(19) United States
(12) Patent Application Publication
(10) Pub. No.: US 2009/0202528 A1
(43) Pub. Date: Aug. 13, 2009

(54) Surface-Located Streptococcus Pneumoniae Polypeptides

(76) Inventors: Thomas Kofoed, Odense (DK); Pia Nyborg Nielsen, Odense (DK); Petra Schrotz-King, Odense (DK); Jorgen Petersen, Odense (DK); Anders Boysen, Odense (DK); Tatyana A. Prokhorova, Ejby (DK); Jens Sigh, Frederiksberg (DK); Christian Morsczeck, Odense (DK)

Correspondence Address: DAVIS WRIGHT TREMAINE LLP - San Francisco, 505 MONTGOMERY STREET, SUITE 800, SAN FRANCISCO, CA, 94111, US

(21) Appl. No.: 11/884,287

(22) PCT Filed: Feb. 9, 2006
(86) PCT No.: PCT/DK06/00073

§ 371 Date: Jun. 24, 2008

Related U.S. Application Data
(60) Provisional application No. 60/653,932, filed on Feb. 18, 2005.

(30) Foreign Application Priority Data
Feb. 11, 2005 (DK) PA 2005 00207
Aug. 29, 2005 (DK) PA 2005 01194
Oct. 18, 2005 (PA) PA 2005 01463

(51) Int. Cl. A61K 39/395; C07K 16/18; C07K 14/00; C12N 15/11; C12N 15/00; C12N 7/00; C12N 1/21; A61K 38/16; A61K 39/09; A61K 35/76; A61K 31/7088; G01N 33/569; G01N 33/566; C12Q 1/18

(52) U.S. Cl. 424/133.1; 530/387.1; 530/350; 536/23.1; 435/320.1; 435/235.1; 435/252.33; 514/12; 424/190.1; 530/388.4; 530/387.3; 424/139.1; 424/93.2; 530/387.9; 424/199.1; 424/200.1; 435/7.34; 436/501; 435/32

(57) ABSTRACT

The present invention relates to cell-surface-located polypeptides of Streptococcus pneumoniae and their use in immunisation against Streptococcal infection, in diagnosis of Streptococcus and in identification of compounds with anti-Streptococcus activity. In a further aspect, the invention relates to antibodies capable of recognising cell surface-located polypeptides of Streptococcus pneumoniae and uses thereof.

[0001] All patent and non-patent references cited in this application are hereby incorporated by reference in their entirety. This patent application claims the benefit of priority from U.S. Provisional Application Ser. No. 60/653,932, filed Feb. 18, 2005, which is incorporated herein by reference in its entirety.

### FIELD OF THE INVENTION

[0002] The present invention relates to cell-surface-located polypeptides of Streptococcus pneumoniae and their use in immunisation against Streptococcal infection, in diagnosis of Streptococcus and in identification of compounds with anti-Streptococcus activity.

### BACKGROUND OF THE INVENTION

### Occurrence of Streptococcus Infections

[0003] Sternberg and Pasteur were the first to identify Streptococcus pneumoniae, initially described as the pneumococcus (Austrian R. The pneumococcus at the millennium: not down, not out. J Infect Dis 1999; 179 (Suppl 2):S338-41). Streptococcus pneumoniae is a Gram-positive encapsulated coccus. Based on differences in the composition of the polysaccharide capsule, about 90 serotypes are identified. This capsule is an essential virulence factor. The majority of pneumococcal disease in infants is associated with a small number of these serotypes, which may vary by region. Current data suggest that the 11 most common serotypes cause at least 75% of invasive disease in all regions.

[0004] Streptococcus pneumoniae is a human pathogen. The reservoir for pneumococci is presumably the nasopharynx of asymptomatic human carriers. There is no animal or insect vector. Streptococcus pneumoniae is the most common cause of bacteremia, pneumonia, meningitis and otitis media in young children. Pneumococcal disease is a very serious illness in young children. In the United States it is estimated that Streptococcus pneumoniae cause 200 deaths, 700 cases of meningitis, 17,000 cases of bacteremia, 4.9 million cases of otitis media (ear infections) annually in children under 5 years of age. In Europe and the United States, pneumococcal pneumonia is the most common community-acquired bacterial pneumonia, estimated to affect approximately 100 per 100 000 adults each year. The corresponding figures for febrile bacteremia and meningitis are 15-19 per 100,000 and 1-2 per 100,000, respectively. The risk for one or more of these manifestations is much higher in infants and elderly people.

[0005] Meningitis is the most severe type of pneumococcal disease. Of children under 5 years with pneumococcal meningitis, about 5% will die of their infection and others may have long-term problems such as hearing loss. Many children with pneumococcal pneumonia or blood stream infections will be ill enough to be hospitalized; about 1% of children with blood stream infections or pneumonia with a blood stream Infection will die of their illness. Nearly all children with ear infections recover, although children with recurrent infections can suffer hearing loss.

[0006] At serious risk are also patients taking immunosuppressive chemotherapy, those with congenital and acquired immune deficiency (including HIV infections) and those with chronic renal disease. Table. 1: The major disease indications and the number of hospitalised patients as well as case fatality rates in children and the elderly, which occur per annum in the US:

| | Pneumococcal | Pneumococcal | Pneumococcal |
|---|---|---|---|
| Disease indication | pneumonia | bacteraemia | meningitis |
| Hospitalised patients/ | 175.000 | 50.000 | 3.000-6.000 |
| annum in the US | | | |
| Case fatality rate | 5-7%/higher | 20%/60% | 30%/80% |
| children/elderly | | | |

TABLE 2
Incidence, case-fatality ratio, projected U.S. cases and deaths, and proportion nonsusceptible to
penicillin of invasive disease identified in the Active Bacterial Core surveillance (ABCs), 1998

| | Group A | Group B | Haemophilus | Neisseria | Streptococcus |
|---|---|---|---|---|---|
| | Streptococcus | Streptococcus | influenzae | meningitidis | pneumoniae |
| Aggregate incidence^{a} | 3.8 | 6.5 | 1.4 | 1.0 | 24.1 |
| Rauge by area^{a} | 2.6-4.1 | 4.8-8.5 | 1.1-2.3 | 0.6-2.0 | 20.0-28.9 |
| Case- fatality ratio | 12.2% | 9.5% | 13.9% | 13.7% | 9.3% |
| in ABCs areas | | | | | |
| Projected U.S. cases | 10,200 | 17.400 | 3.900 | 2.500 | 63,000 |
| Projected U.S. deaths | 1,300 | 1,700 | 500 | 400 | 6,100 |
| Penicillin nonsusceptibility^{b} | 0 | 0 | — | 1.1% | 25.0% |

^{a}Incidence = cases per 100,000.
^{b}Nonsusceptible includes isolates classified as either intermediate or resistant to penicillin. Results reflect testing of group A streptococcal isolates from 1997 (n = 183) and group B streptococcal isolates from 1997 and 1998 combined (n = 188).

[0007] Schuchat, A et al. “Active Bacterial Core Surveillance of the Emerging Infections. Program Network”, Emerging Infectious Diseases, Vol. 7, No. 1, January-February 2001.

Symptoms of Streptococcus pneumoniae Infections

[0008] Pneumococcal pneumonia is the most common clinical presentation of pneumococcal disease among adults. The incubation period of pneumococcal pneumonia is short, about 1 to 3 days. Symptoms generally include an abrupt onset of fever and chills or rigors. Typically there is a single rigor, and repeated shaking chills are uncommon. Other common symptoms include pleuritic chest pain, cough productive of mucopurulent, rusty sputum, dyspnea (shortness of breath), tachypnea (rapid breathing), hypoxia (poor oxygenation), tachycardia (rapid heart rate), malaise, and weakness.

Treatment and Prevention of Streptococcus pneumoniae Infections

[0009] The emerging resistance to penicillin and other commonly used antibiotics underscores the importance of the development of novel strategies to combat pneumococcal disease. In some areas of the U.S. up to 40% of invasive pneumococcal isolates are resistant to penicillin. Treatment will usually include a broad spectrum cephalosporin, and often vancomycin, until results of antibiotic sensitivity testing are available.

[0010] There are two vaccines against Streptococcus pneumoniae available on the market:
[0011] 1. Prevnar® (Wyeth), a 7-valent pneumococcal conjugate vaccine, containing polysaccharides of serotype 4, 6B, 9V, 14, 18C, 19F and 23F.
[0012] 2. Pneumovax® (Merck Research Laboratories), a 23-valent polysaccharide vaccine containing 23 purified capsular polysaccharide antigens (serotypes 1, 2, 3, 4, 5, 6B, 7F, 8, 9N, 10A, 11A, 12F, 14, 15B, 17F, 18C, 19A, 19F, 20, 22F, 23F, and 33F).

[0013] However, there is still a large medical need for development of improved Streptococcus vaccines, because:
[0014] These vaccines only cover certain serotypes, e.g. Prevnar® has a potential coverage of over 85% of the pneumococcal isolates for the USA, 60-70% for Europe and around 55% for Asia.
[0015] Children under 2 years of age, who suffer the highest rates of pneumococcal carriage and disease, and immunocompromised patients show a severely impaired antibody response upon this vaccination.
[0016] The polysaccharide vaccines are not effective against acute otitis media caused by Streptococcus pneumoniae.
[0017] The polysaccharide vaccines do not induce a T-cell-dependent immune response. This implicates the absence of memory B cells and limits the period of protection.
[0018] Several of the capsule polysaccharides are poorly immunogenic. These include several serotypes associated with penicillin resistance.

[0019] Currently, several pneumococcal surface proteins are considered as alternative vaccine candidates because of their serotype-independence. However, so far, none of the proteins are considered to elicit species-wide pneumococcal protection. This can be explained by the occurrence of allelic variation within most individual proteins. Antibodies raised against a single protein may not recognize allelic variants. Efficacy against pneumonia is an important factor in deciding on the use of new vaccines in developing countries.

[0020] In addition to better ways of treatment and prevention, there is a need for novel rapid and reliable methods for diagnosis of Streptococcus pneumoniae infections. The above objectives can be accomplished through the identification and use of suitable Streptococcus pneumoniae polypeptides that can function as targets, i.e. targets for the immune system and/or for antibodies, targets for cytotoxic inhibitors, or targets for indicator moieties in diagnosis.

### SUMMARY OF THE INVENTION

[0021] The present application relates to surface-located polypeptides of Streptococcus pneumoniae. In the context of this application, a ‘surface-located’ polypeptide is defined as a polypeptide which is at least partially (i.e. part of the polypeptide chain and/or part of the population of polypeptide molecules) localised outside the membrane of a Streptococcus pneumoniae cell. Thus, a surface-located polypeptide is a polypeptide which is fully or partially exposed to the space outside the membrane. Surface-located polypeptides furthermore include all polypeptides or polypeptide fragments that can be identified in fractions obtained by high-pH surface-protein extraction or mutanolysin digestion as described herein.

[0022] Surface-located polypeptides are attractive targets for antibacterial therapy and/or diagnosis of bacterial infection, since the exposure of such polypeptides to the extracellular space means that compounds that interact with these polypeptides (e.g. compounds used to prevent, treat or diagnose bacterial infections) often do not need to enter or pass the membrane to be effective.

[0023] The determination of cell-surface localisation of a Streptococcus pneumoniae polypeptide can at present only be done experimentally and not by bioinformatics, as no common sorting signals or motifs are known for this localisation. It is possible to predict with some degree of certainty whether or not polypeptides enter the periplasm, but no general motif has been identified for surface-localisation of polypeptide. Prior art strategies for the identification of candidates for protein vaccination against Streptococcus pneumoniae have mainly been based on genome sequencing and in silico analysis (WO 02/077021; Wizemann et al. (2001) Infect. Immun. 69:1593-1598). These strategies have not been very successful, as only a small subpopulation of the candidates identified and tested conferred protection in a mouse model (Wizemann et al. (2001) Infect. Immun. 69:1593-1598).

[0024] The inventors have identified 282 different polypeptides in cell-surface fractions of Streptococcus pneumoniae. The method that was employed identifies polypeptides that are expressed at a relatively high level. The combination of being surface-exposed and being present in relatively high amounts makes these polypeptides highly suitable as targets for antibodies and thus for use in passive or active immunisation/vaccination.

[0025] Accordingly, in a first aspect, the invention relates to a composition comprising
[0026] a polypeptide which comprises a sequence selected from the group consisting of surface-located Streptococcus polypeptides of SEQ ID NO:1-282, or comprises an antigenic fragment or variant of said sequence,
[0027] or
[0028] a polynucleotide comprising a sequence encoding said polypeptide,
[0029] or
[0030] an expression vector comprising a sequence encoding said polypeptide,
[0031] or
[0032] a recombinant virus or recombinant cell comprising said polynucleotide or said expression vector,
[0033] or
[0034] an antibody capable of binding said polypeptide,
   for use as a medicament.

[0035] In a preferred embodiment, said composition comprises
[0036] a polypeptide which comprises a sequence selected from the group consisting of SEQ ID NO:16, SEQ ID NO:10, SEQ ID NO:13, and SEQ ID NO:28, or comprises an antigenic fragment or variant of said sequence,
[0037] or
[0038] a polynucleotide comprising a sequence encoding said polypeptide,
[0039] or
[0040] an expression vector comprising a sequence encoding said polypeptide,
[0041] or
[0042] a recombinant virus or recombinant cell comprising said polynucleotide or said expression vector.

[0043] In an even more preferred embodiment, said composition comprises
[0044] a polypeptide which comprises SEQ ID NO:16, or comprises an antigenic fragment or variant of SEQ ID NO:16,
[0045] or
[0046] a polynucleotide comprising a sequence encoding said polypeptide,
[0047] or
[0048] an expression vector comprising a sequence encoding said polypeptide,
[0049] or
[0050] a recombinant virus or recombinant cell comprising said polynucleotide or said expression vector. SEQ ID NO:16 represents a homolog of lipoate-protein ligase A, an enzyme which has previously been identified and characterised in E. coli and L. monocytogenes (Morris et al. (1994) J. Biol. Chem. 269:16091; O'Riordan et al. (2003) Science 302:462). Proteins of this family have not previously been identified on the cell surface or found to be vaccine candidates or suitable targets for antibody therapy.

[0051] In another preferred embodiment, said composition comprises an antibody capable of binding a polypeptide selected from the group consisting of SEQ ID NO:16, SEQ ID NO:10, SEQ ID NO:13, SEQ ID NO:20, SEQ ID NO:26, SEQ ID NO:28 and SEQ ID NO:33. In an even more preferred embodiment, said polypeptide is SEQ ID NO:16.

[0052] In a further main aspect, the invention relates to the use of a composition comprising
[0053] a polypeptide which comprises a sequence selected from the group consisting of SEQ ID NO:1-282, or comprises an antigenic fragment or variant of said sequence,
[0054] a polynucleotide comprising a sequence encoding said polypeptide,
[0055] an expression vector comprising a sequence encoding said polypeptide, or
[0056] a recombinant virus or recombinant cell comprising said polynucleotide or said expression vector,
   for the preparation of a medicament for the immunisation of an animal or human being against bacteria, preferably Streptococcus, more preferably Streptococcus pneumoniae, infections. Preferred sequences are SEQ ID NO:16, SEQ ID NO:10, SEQ ID NO:13, and SEQ ID NO:28. Most preferred SEQ ID NO:16.

[0057] In a further main aspect, the invention relates to an antibody capable of binding a polypeptide selected from the group consisting of SEQ ID NO:1-282.

[0058] Furthermore, the invention relates, in a main aspect, to the use of an antibody capable of binding a polypeptide selected from the group consisting of SEQ ID NO:1-282 for the manufacture of a medicament for the treatment or prevention of Streptococcus, preferably Streptococcus pneumoniae, infections in an animal or human being. The use of antibodies capable of binding a polypeptide selected from the group consisting of SEQ ID NO:16, SEQ ID NO:10, SEQ ID NO:13, SEQ ID NO:20, SEQ ID NO:26, SEQ ID NO:28 or SEQ ID NO:33 is preferred.

[0059] Most preferred is the use of an antibody capable of binding the polypeptide of SEQ ID NO:16 for the manufacture of a medicament for the treatment or prevention of Streptococcus, preferably Streptococcus pneumoniae, infections in an animal or human being.

[0060] The combination of being surface-exposed and being present in relatively high amounts also makes the polypeptides identified by the inventors highly suitable as targets for diagnosis of Streptococcus pneumoniae infection, allowing detection of intact cells with high sensitivity. Thus, in a further main aspect, the invention relates to methods for detecting Streptococcus pneumoniae or parts thereof, using indicator moieties capable of recognising the cell-surface located polypeptides described herein.

[0061] In addition, the surface-localisation of the polypeptides makes them suitable as targets for inhibitors. Such inhibitors may be bactericidal or bacteriostatic or prevent interaction of Streptococcus pneumoniae with the host organism (virulence). Thus, in a further main aspect, the invention relates to methods for identifying inhibitors of the cell-surface located polypeptides described herein.

### DEFINITIONS

[0062] Vaccine—is used to indicate a composition capable of inducing a protective immune response against a microorganism in a human being or animal.
[0063] Protective immune response—is used to indicate an immune response (humoral/antibody and/or cellular) inducing memory in an organism, resulting in the infectious agent, herein Streptococcus pneumoniae, being met by a secondary rather than a primary response, thus reducing its impact on the host organism.
[0064] Polypeptide—unless specified otherwise, the term ‘polypeptide’ when used herein can also refer to a variant or fragment of a polypeptide. Preferred polypeptides are antigenic polypeptides.
[0065] Fragment—is used to indicate a non-full length part of a polypeptide. Thus, a fragment is itself also a polypeptide.
[0066] Variant—a ‘variant’ of a given reference polypeptide refers to a polypeptide that displays a certain degree of sequence identity to said reference polypeptide, but is not identical to said reference polypeptide.
[0067] Antigen/antigenic/antigenicity/immunogen/immunogenic/immunogenicity all refer to the capability of inducing an immune response.
[0068] Immunogenic carrier—refers to a compound which directly or indirectly assists or strengthens an immune response.
[0069] Expression vector—refers to a, preferably recombinant, plasmid or phage or virus to be used in production of a polypeptide from a polynucleotide sequence. An expression vector comprises an expression construct, comprising an assembly of (1) a genetic element or elements having a regulatory role in gene expression, for example, promoters or enhancers, (2) a structural or coding sequence which is transcribed into mRNA and translated into protein, and which is operably linked to the elements of (1); and (3) appropriate transcription initiation and termination sequences.
[0070] Binding partner—of a polypeptide refers to a molecule that can bind to said polypeptide. Such binding can be indirect, through another molecule, but is preferably direct. A binding partner can be any type of molecule, such as e.g. small hydrophobic molecules or e.g. a cellular or extracellular macromolecule, such as a protein, a carbohydrate or a nucleic acid. Preferred types of binding partners include antibodies, ligands or inhibitors.
[0071] Plurality—the term ‘plurality’ indicates more than one, preferably more than 10.
[0072] Indicator moiety—the term ‘indicator moiety’ covers a molecule or a complex of molecules that is capable of specifically binding a given polypeptide and/or cell, and is capable of generating a detectable signal. Preferably, the indicator moiety is an antibody or comprises an antibody molecule. Thus, a preferred indicator moiety is an antibody coupled to or in complex with a detectable substance.
[0073] Host-derived molecule or host molecule—refers to a molecule which is normally found in a host organism that can be infected with Streptococcus pneumoniae. A host-derived molecule is preferably a host, polypeptide, preferably a human polypeptide.
[0074] Antibody—the term ‘antibodies’ when used herein is intended to cover antibodies as well as functional equivalents thereof. Thus, this includes polyclonal antibodies, monoclonal antibodies (mAbs), humanised, human or chimeric antibodies, single-chain antibodies, and also binding fragments of antibodies, such as, but not limited to, Fab fragments, F(ab′)₂ fragments, fragments produced by a Fab expression library, anti-idiotypic antibodies, hybrids comprising antibody fragments, and epitope-binding fragments of any of the these. The term also includes multivalent, multispecific, such as bispecific antibodies and mixtures of monoclonal antibodies.
[0075] Dissociation constant, Kd, is a measure to describe the strength of binding (or affinity or avidity) between macromolecules, for example an antibody and its antigen. The smaller Kd the stronger binding.

[0076] Isolated—used in connection with polypeptides, polynucleotides and antibodies disclosed herein ‘isolated’ refers to these having been identified and separated and/or recovered from a component of their natural, typically cellular, environment. Contaminant components of the natural environment are materials that would typically interfere with diagnostic or therapeutic uses for the polypeptide, and may include enzymes, hormones, and other proteinaceous or non-proteinaceous solutes. Polypeptides, polynucleotides and antibodies of the invention are preferably isolated, and vaccines and other compositions of the invention preferably comprise isolated polypeptides or isolated polynucleotides or isolated antibodies.

### DETAILED DESCRIPTION

### Figures

[0077] FIG. 1: A table of preferred compositions of the invention. The numbers in the columns and rows indicate SEQ ID NOs. Each cross refers to a composition comprising the polypeptide (or antigenic fragment or variant thereof) of the column to which the cross belongs as well as the polypeptide (or antigenic fragment or variant thereof) of the row to which the cross belongs.

[0078] FIG. 2: List of amino acid sequences of surface-located Streptococcus pneumoniae polypeptides.

[0079] FIG. 3: RT-PCR with cDNA derived from a spleen from a mouse infected with S. pneumoniae D39 at 1 day of infection. Primers were used specific for transcripts for antigens 029 (SEQ ID NO:16), 060 (SEQ ID NO:26), 607 (SEQ ID NO:20) and 653 (SEQ ID NO:33). Moreover, primers were used specific for transcript of the Sigma 70 subunit of the pneumococcal RNA-Polymerase (house keeping gene). −RT: control without reverse transcriptase; +RT: RT—PCR; N: non-template control.

[0080] FIG. 4: Immunoblot with patient serum (single patient) for detection of rec. vac. (antigens) 029, 060, 144, 487, 607, 646 and 653.

[0081] FIG. 5: Immunogenicity of antigens (ags) 029, 060, 607, 653 and controls with untreated animals (non immunized), Alum adjuvants alone, and an unrelated antigen at days 0, 21 and 35 of vaccination.

[0082] FIG. 6: CFU 6 h after challenge with S. pneumoniae D39 in blood of mice vaccinated with antigens (ags) 029, 060, 607, 653 and controls with untreated animals (non immunized), Alum adjuvants alone, and unrelated antigen.

[0083] FIG. 7: Survivors after challenge with S. pneumoniae D39 of mice vaccinated with antigens (ags) 029 and 607 compared with control groups with untreated animals (non immunized), Alum adjuvants alone and an unrelated antigen (sigma)

### COMPOSITIONS FOR USE AS A MEDICAMENT

[0084] In a first main aspect, the invention relates to a composition comprising
[0085] a polypeptide which comprises a sequence selected from the group consisting of surface-located Streptococcus pneumoniae polypeptides of SEQ ID NO:1-282, or comprises an antigenic fragment or variant of said sequence,
[0086] a polynucleotide comprising a sequence encoding said polypeptide,
[0087] an expression vector comprising a sequence encoding said polypeptide,
[0088] a recombinant virus or recombinant cell comprising said polynucleotide or said expression vector, or
[0089] an antibody capable of binding said polypeptide,
   for use as a medicament.

[0090] In an important embodiment, the composition comprises
[0091] a polypeptide which comprises a sequence selected from the group consisting of SEQ ID NO:1-282, or comprises an antigenic fragment or variant of said sequence,
[0092] a polynucleotide comprising a sequence encoding said polypeptide,
[0093] an expression vector comprising a sequence encoding said polypeptide, or
[0094] a recombinant virus or recombinant cell comprising said polynucleotide or said expression vector.

[0095] Said composition can be used as a vaccine for active immunisation of an individual in need thereof. This is described in the section ‘vaccine compositions and methods of vaccination of the invention’.

[0096] In one preferred embodiment, the composition comprises a polypeptide which comprises a sequence selected from the group consisting of SEQ ID NO:1-282 or comprises antigenic fragment or variant of said sequence.

[0097] In another important embodiment, the composition comprises an antibody capable of binding a polypeptide selected from the group consisting of surface-located Streptococcus pneumoniae polypeptides of SEQ ID NO:1-282. Said composition can e.g. be used in passive immunisation of an individual in need thereof. This is described in the section ‘antibodies and methods for raising antibodies of the invention’.

### Vaccine Compositions and Methods of Vaccination of the Invention

[0098] The goal of vaccination or active immunisation is to provide protective immunity by inducing a memory response to an infectious microorganism using an antigenic or immunogenic composition. Thus, a vaccine is a composition capable of inducing a protective immune response against a microorganism in a human being or animal. Such an immune response can be a cellular response and/or a humoral response, e.g. a specific T cell response or an antibody response.

[0099] Accordingly, in an important embodiment, the composition is a vaccine composition. I.e. the invention relates to the use of a composition comprising
[0100] a polypeptide which comprises a sequence selected from the group consisting of surface-located Streptococcus pneumoniae polypeptides of SEQ ID NO:1-282, or comprises an antigenic fragment or variant of said sequence,
[0101] a polynucleotide comprising a sequence encoding said polypeptide,
[0102] an expression vector comprising a sequence encoding said polypeptide, or
[0103] a recombinant virus or recombinant cell comprising said polynucleotide or said expression vector,
   as a vaccine.

[0104] The variant herein preferably has at least 95% sequence identity, such as at least 96%, e.g. at least 97%, such as at least 98%, e.g. at least 99% sequence identity to said sequence.

[0105] In one preferred embodiment of the above composition, the polypeptide comprises SEQ ID NO:1, or an antigenic fragment or variant thereof.

[0106] In another preferred embodiment of the above composition, the polypeptide comprises SEQ ID NO:2, or an antigenic fragment or variant thereof.

[0107] In another preferred embodiment of the above composition, the polypeptide comprises SEQ ID NO:3, or an antigenic fragment or variant thereof.

[0108] In another preferred embodiment of the above composition, the polypeptide comprises SEQ ID NO:4, or an antigenic fragment or variant thereof.

[0109] In another preferred embodiment of the above composition, the polypeptide comprises SEQ ID NO:5, or an antigenic fragment or variant thereof.

[0110] In another preferred embodiment of the above composition, the polypeptide comprises SEQ ID NO:6, or an antigenic fragment or variant thereof.

[0111] In another preferred embodiment of the above composition, the polypeptide comprises SEQ ID NO:7, or an antigenic fragment or variant thereof.

[0112] In another preferred embodiment of the above composition, the polypeptide comprises SEQ ID NO:8, or an antigenic fragment or variant thereof.

[0113] In another preferred embodiment of the above composition, the polypeptide comprises SEQ ID NO:9, or an antigenic fragment or variant thereof.

[0114] In another preferred embodiment of the above composition, the polypeptide comprises SEQ ID NO:10, or an antigenic fragment or variant thereof.

[0115] In another preferred embodiment of the above composition, the polypeptide comprises SEQ ID NO:11, or an antigenic fragment or variant thereof.

[0116] In another preferred embodiment of the above composition, the polypeptide comprises SEQ ID NO:12, or an antigenic fragment or variant thereof.

[0117] In another preferred embodiment of the above composition, the polypeptide comprises SEQ ID NO:13, or an antigenic fragment or variant thereof.

[0118] In another preferred embodiment of the above composition, the polypeptide comprises SEQ ID NO:14, or an antigenic fragment or variant thereof.

[0119] In another preferred embodiment of the above composition, the polypeptide comprises SEQ ID NO:15, or an antigenic fragment or variant thereof.

[0120] In another preferred embodiment of the above composition, the polypeptide comprises SEQ ID NO:16, or an antigenic fragment or variant thereof.

[0121] In another preferred embodiment of the above composition, the polypeptide comprises SEQ ID NO:17, or an antigenic fragment or variant thereof.

[0122] In another preferred embodiment of the above composition, the polypeptide comprises SEQ ID NO:18, or an antigenic fragment or variant thereof.

[0123] In another preferred embodiment of the above composition, the polypeptide comprises SEQ ID NO:19, or an antigenic fragment or variant thereof.

[0124] In another preferred embodiment of the above composition, the polypeptide comprises SEQ ID NO:20, or an antigenic fragment or variant thereof.

[0125] In another preferred embodiment of the above composition, the polypeptide comprises SEQ ID NO:21, or an antigenic fragment or variant thereof.

[0126] In another preferred embodiment of the above composition, the polypeptide comprises SEQ ID NO:22, or an antigenic fragment or variant thereof.

[0127] In another preferred embodiment of the above composition, the polypeptide comprises SEQ ID NO:23, or an antigenic fragment or variant thereof.

[0128] In another preferred embodiment of the above composition, the polypeptide comprises SEQ ID NO:24, or an antigenic fragment or variant thereof.

[0129] In another preferred embodiment of the above composition, the polypeptide comprises SEQ ID NO:25, or an antigenic fragment or variant thereof.

[0130] In another preferred embodiment of the above composition, the polypeptide comprises SEQ ID NO:26, or an antigenic fragment or variant thereof.

[0131] In another preferred embodiment of the above composition, the polypeptide comprises SEQ ID NO:27, or an antigenic fragment or variant thereof.

[0132] In another preferred embodiment of the above composition, the polypeptide comprises SEQ ID NO:28, or an antigenic fragment or variant thereof.

[0133] In another preferred embodiment of the above composition, the polypeptide comprises SEQ ID NO:29, or an antigenic fragment or variant thereof.

[0134] In another preferred embodiment of the above composition, the polypeptide comprises SEQ ID NO:30, or an antigenic fragment or variant thereof.

[0135] In another preferred embodiment of the above composition, the polypeptide comprises SEQ ID NO:31, or an antigenic fragment or variant thereof.

[0136] In another preferred embodiment of the above composition, the polypeptide comprises SEQ ID NO:32, or an antigenic fragment or variant thereof.

[0137] In another preferred embodiment of the above composition, the polypeptide comprises SEQ ID NO:33, or an antigenic fragment or variant thereof.

[0138] In another preferred embodiment of the above composition, the polypeptide comprises SEQ ID NO:34, or an antigenic fragment or variant thereof.

[0139] In another preferred embodiment of the above composition, the polypeptide comprises SEQ ID NO:35, or an antigenic fragment or variant thereof.

[0140] In another preferred embodiment of the above composition, the polypeptide comprises SEQ ID NO:36, or an antigenic fragment or variant thereof.

[0141] In another preferred embodiment of the above composition, the polypeptide comprises SEQ ID NO:37, or an antigenic fragment or variant thereof.

[0142] In another preferred embodiment of the above composition, the polypeptide comprises SEQ ID NO:38, or an antigenic fragment or variant thereof.

[0143] In another preferred embodiment of the above composition, the polypeptide comprises SEQ ID NO:39, or an antigenic fragment or variant thereof.

[0144] In another preferred embodiment of the above composition, the polypeptide comprises SEQ ID NO:40, or an antigenic fragment or variant thereof.

[0145] In another preferred embodiment of the above composition, the polypeptide comprises SEQ ID NO:41, or an antigenic fragment or variant thereof.

[0146] In another preferred embodiment of the above composition, the polypeptide comprises SEQ ID NO:42, or an antigenic fragment or variant thereof.

[0147] In another preferred embodiment of the above composition, the polypeptide comprises SEQ ID NO:43, or an antigenic fragment or variant thereof.

[0148] In another preferred embodiment of the above composition, the polypeptide comprises SEQ ID NO:44, or an antigenic fragment or variant thereof.

[0149] In another preferred embodiment of the above composition, the polypeptide comprises SEQ ID NO:45, or an antigenic fragment or variant thereof.

[0150] In another preferred embodiment of the above composition, the polypeptide comprises SEQ ID NO:46, or an antigenic fragment or variant thereof.

[0151] In another preferred embodiment of the above composition, the polypeptide comprises SEQ ID NO:47, or an antigenic fragment or variant thereof.

[0152] In another preferred embodiment of the above composition, the polypeptide comprises SEQ ID NO:48, or an antigenic fragment or variant thereof.

[0153] In another preferred embodiment of the above composition, the polypeptide comprises SEQ ID NO:49, or an antigenic fragment or variant thereof.

[0154] In another preferred embodiment of the above composition, the polypeptide comprises SEQ ID NO:50, or an antigenic fragment or variant thereof.

[0155] In another preferred embodiment of the above composition, the polypeptide comprises SEQ ID NO:51, or an antigenic fragment or variant thereof.

[0156] In another preferred embodiment of the above composition, the polypeptide comprises SEQ ID NO:52, or an antigenic fragment or variant thereof.

[0157] In another preferred embodiment of the above composition, the polypeptide comprises SEQ ID NO:53, or an antigenic fragment or variant thereof.

[0158] In another preferred embodiment of the above composition, the polypeptide comprises SEQ ID NO:54, or an antigenic fragment or variant thereof.

[0159] In another preferred embodiment of the above composition, the polypeptide comprises SEQ ID NO:55, or an antigenic fragment or variant thereof.

[0160] In another preferred embodiment of the above composition, the polypeptide comprises SEQ ID NO:56, or an antigenic fragment or variant thereof.

[0161] In another preferred embodiment of the above composition, the polypeptide comprises SEQ ID NO:57, or an antigenic fragment or variant thereof.

[0162] In another preferred embodiment of the above composition, the polypeptide comprises SEQ ID NO:58, or an antigenic fragment or variant thereof.

[0163] In another preferred embodiment of the above composition, the polypeptide comprises SEQ ID NO:59, or an antigenic fragment or variant thereof.

[0164] In another preferred embodiment of the above composition, the polypeptide comprises SEQ ID NO:60, or an antigenic fragment or variant thereof.

[0165] In another preferred embodiment of the above composition, the polypeptide comprises SEQ ID NO:61, or an antigenic fragment or variant thereof.

[0166] In another preferred embodiment of the above composition, the polypeptide comprises SEQ ID NO:62, or an antigenic fragment or variant thereof.

[0167] In another preferred embodiment of the above composition, the polypeptide comprises SEQ ID NO:63, or an antigenic fragment or variant thereof.

[0168] In another preferred embodiment of the above composition, the polypeptide comprises SEQ ID NO:64, or an antigenic fragment or variant thereof.

[0169] In another preferred embodiment of the above composition, the polypeptide comprises SEQ ID NO:65, or an antigenic fragment or variant thereof.

[0170] In another preferred embodiment of the above composition, the polypeptide comprises SEQ ID NO:66, or an antigenic fragment or variant thereof.

[0171] In another preferred embodiment of the above composition, the polypeptide comprises SEQ ID NO:67, or an antigenic fragment or variant thereof.

[0172] In another preferred embodiment of the above composition, the polypeptide comprises SEQ ID NO:68, or an antigenic fragment or variant thereof.

[0173] In another preferred embodiment of the above composition, the polypeptide comprises SEQ ID NO:69, or an antigenic fragment or variant thereof.

[0174] In another preferred embodiment of the above composition, the polypeptide comprises SEQ ID NO:70, or an antigenic fragment or variant thereof.

[0175] In another preferred embodiment of the above composition, the polypeptide comprises SEQ ID NO:71, or an antigenic fragment or variant thereof.

[0176] In another preferred embodiment of the above composition, the polypeptide comprises SEQ ID NO:72, or an antigenic fragment or variant thereof.

[0177] In another preferred embodiment of the above composition, the polypeptide comprises SEQ ID NO:73, or an antigenic fragment or variant thereof.

[0178] In another preferred embodiment of the above composition, the polypeptide comprises SEQ ID NO:74, or an antigenic fragment or variant thereof.

[0179] In another preferred embodiment of the above composition, the polypeptide comprises SEQ ID NO:75, or an antigenic fragment or variant thereof.

[0180] In another preferred embodiment of the above composition, the polypeptide comprises SEQ ID NO:76, or an antigenic fragment or variant thereof.

[0181] In another preferred embodiment of the above composition, the polypeptide comprises SEQ ID NO:77, or an antigenic fragment or variant thereof.

[0182] In another preferred embodiment of the above composition, the polypeptide comprises SEQ ID NO:78, or an antigenic fragment or variant thereof.

[0183] In another preferred embodiment of the above composition, the polypeptide comprises SEQ ID NO:79, or an antigenic fragment or variant thereof.

[0184] In another preferred embodiment of the above composition, the polypeptide comprises SEQ ID NO:80, or an antigenic fragment or variant thereof.

[0185] In another preferred embodiment of the above composition, the polypeptide comprises SEQ ID NO:81, or an antigenic fragment or variant thereof.

[0186] In another preferred embodiment of the above composition, the polypeptide comprises SEQ ID NO:82, or an antigenic fragment or variant thereof.

[0187] In another preferred embodiment of the above composition, the polypeptide comprises SEQ ID NO:83, or an antigenic fragment or variant thereof.

[0188] In another preferred embodiment of the above composition, the polypeptide comprises SEQ ID NO:84, or an antigenic fragment or variant thereof.

[0189] In another preferred embodiment of the above composition, the polypeptide comprises SEQ ID NO:85, or an antigenic fragment or variant thereof.

[0190] In another preferred embodiment of the above composition, the polypeptide comprises SEQ ID NO:86, or an antigenic fragment or variant thereof.

[0191] In another preferred embodiment of the above composition, the polypeptide comprises SEQ ID NO:87, or an antigenic fragment or variant thereof.

[0192] In another preferred embodiment of the above composition, the polypeptide comprises SEQ ID NO:88, or an antigenic fragment or variant thereof.

[0193] In another preferred embodiment of the above composition, the polypeptide comprises SEQ ID NO:89, or an antigenic fragment or variant thereof.

[0194] In another preferred embodiment of the above composition, the polypeptide comprises SEQ ID NO:90, or an antigenic fragment or variant thereof.

[0195] In another preferred embodiment of the above composition, the polypeptide comprises SEQ ID NO:91, or an antigenic fragment or variant thereof.

[0196] In another preferred embodiment of the above composition, the polypeptide comprises SEQ ID NO:92, or an antigenic fragment or variant thereof.

[0197] In another preferred embodiment of the above composition, the polypeptide comprises SEQ ID NO:93, or an antigenic fragment or variant thereof.

[0198] In another preferred embodiment of the above composition, the polypeptide comprises SEQ ID NO:94, or an antigenic fragment or variant thereof.

[0199] In another preferred embodiment of the above composition, the polypeptide comprises SEQ ID NO:95, or an antigenic fragment or variant thereof.

[0200] In another preferred embodiment of the above composition, the polypeptide comprises SEQ ID NO:96, or an antigenic fragment or variant thereof.

[0201] In another, preferred embodiment of the above composition, the polypeptide comprises SEQ ID NO:97, or an antigenic fragment or variant thereof.

[0202] In another preferred embodiment of the above composition, the polypeptide comprises SEQ ID NO:98, or an antigenic fragment or variant thereof.

[0203] In another preferred embodiment of the above composition, the polypeptide comprises SEQ ID NO:99, or an antigenic fragment or variant thereof.

[0204] In another preferred embodiment of the above composition, the polypeptide comprises SEQ ID NO:100, or an antigenic fragment or variant thereof.

[0205] In another preferred embodiment of the above composition, the polypeptide comprises SEQ ID NO:101, or an antigenic fragment or variant thereof.

[0206] In another preferred embodiment of the above composition, the polypeptide comprises SEQ ID NO:102, or an antigenic fragment or variant thereof.

[0207] In another preferred embodiment of the above composition, the polypeptide comprises SEQ ID NO:103, or an antigenic fragment or variant thereof.

[0208] In another preferred embodiment of the above composition, the polypeptide comprises SEQ ID NO:104, or an antigenic fragment or variant thereof.

[0209] In another preferred embodiment of the above composition, the polypeptide comprises SEQ ID NO:105, or an antigenic fragment or variant thereof.

[0210] In another preferred embodiment of the above composition, the polypeptide comprises SEQ ID NO:168, or an antigenic fragment or variant thereof.

[0211] A composition comprising the polypeptide of SEQ ID NO:16, or an antigenic fragment or variant thereof for use as a medicament is at present the most preferred embodiment.

[0212] In some embodiments of the composition, the polypeptide consists of a sequence selected from the group of SEQ ID NO:1-282. In other embodiments, the polypeptide comprises a sequence selected from the group of SEQ ID NO:1-282 or an antigenic fragment or variant of said sequence, as well as a tag, such as a his-tag, i.e. a polyhistidine tag.

[0213] In another preferred embodiment, the polypeptide in the composition of the invention may be combined with or fused to a toxin, e.g. an enterotoxigenic Escherichia coli Stable or Labile toxin. A suitable heat stable toxin II (STII) has been described in Lee et al. (1983) Infect. Immun. 42: 264-268. Examples of suitable fusion proteins are given in SEQ ID NO:295 and SEQ ID NO:296. In one embodiment, the combination comprises the polypeptide of the invention and a non-covalently linked toxin, wherein the toxin may be a single toxin polypeptide, or a multimeric, e.g. dimeric, form comprising multiple copies of the toxin. In another embodiment, the polypeptide of the invention and the toxin are covalently linked, e.g. by post-translational linkage or transcription and translation from a single fused open reading frame. In either case, the two constituents may be linked directly or via a spacer or linker domain, which e.g. may be a peptide linker, preferably a protease-resistant and/or non-immunogenic peptide linker. Such peptide linker may be of any length, e.g. it may be between 2 and 200, such as between 5 and 50 amino acids in length. Multiple copies of the toxin may be fused to the polypeptide of the invention.

[0214] A composition comprising a polypeptide of the invention, e.g. the polypeptide of SEQ ID NO:16, as well as an enterotoxigenic Escherichia coli may be used to manufacture a vaccine for prevention of infection with Streptococcus pneumoniae and/or enterotoxigenic Escherichia.

[0215] In further embodiments, the composition of the invention may comprise dimers of any of the polypeptides of SEQ ID NO:1-282, such as dimers of SEQ ID NO:16. Dimers may e.g. be formed by post-translational linkage or be generated from a single fused open reading frame. In either case, the two monomer units of the dimer may be linked directly or via a spacer or linker domain, which e.g. may be a peptide linker, preferably a protease-resistant and/or non-immunogenic peptide linker. Such a peptide linker may be of any length, e.g. it may be between 2 and 200, such as between 5 and 50 amino acids in length.

[0216] The composition may only comprise one polypeptide selected from the group of SEQ ID NO:1-282 or a antigenic fragment or variant thereof. However, in other embodiments, the composition comprises more than one polypeptide of the group of SEQ ID NO:1-282 and/or more than one antigenic fragment of a polypeptide selected from the group of SEQ ID NO:1-282. Thus, the composition according to the invention may comprise more than one, such as 2, for example 3, such as 4, for example 5, such as 6, for example 7, such as 8, for example 9, such as 10, such as a number of polypeptides and/or fragments in the range of from 5 to 10, or more than 10, such as for example in the range of from 10 to 20, different polypeptides selected from the group of SEQ ID NO:1-282 or antigenic fragments or variants thereof.

[0217] Similarly, the composition may only comprise one polynucleotide, one expression vector or one recombinant virus or recombinant cell of the invention. However, in other embodiments, the composition comprises more than one polynucleotide, one expression vector or one recombinant virus or recombinant cell of the invention. Thus, the composition according to the invention may comprise more than one, such as 2, for example 3, such as 4, for example 5, such as 6, for example 7, such as 8, for example 9, such as 10, or more than 10, such as for example in the range of from 10 to 20, different polynucleotides, expression vectors or recombinant viruses or recombinant cells of the invention as described herein.

[0218] Furthermore, in some embodiments, a recombinant cell of the invention may express more than one polypeptide of the group of SEQ ID NO:1-282 and/or more than one antigenic fragment or variant of a polypeptide selected from the group of SEQ ID NO:1-282. Thus, the composition according to the invention may comprise a recombinant cell comprising more than one, such as 2, for example 3, such as 4, for example 5, such as 6, for example 7, such as 8, for example 9, such as 10, such as a number of polypeptides and/or antigenic fragments or variants in the range of from 5 to 10, or more than 10, such as for example in the range of from 10 to 20, different polypeptides selected from the group of SEQ ID NO:1-282 or antigenic fragments or variants thereof. In another embodiment, the composition for use in the invention comprises multiple of the recombinant viruses or recombinant cells described herein.

[0219] Preferably, the composition of the invention comprises one of the combinations of polypeptides (or antigenic fragments or variants thereof) given in Table 1.

[0220] In Table 1, each of the crosses (“x”) placed at the crossing of a column designated with a SEQ ID number with a row designated by another SEQ ID number indicates a composition comprising the two polypeptides of those two SEQ ID numbers (or anti-genic fragments or variants thereof).

[0221] I.e. as an example, entirely for illustrative purposes and not intended in a limiting manner, the cross (“x”) at the crossing of the column of SEQ ID NO:2 (“2”) with the row of SEQ ID NO:1 (“1”) indicates a composition comprising:
[0222] the polypeptide of SEQ ID NO: 1 or an antigenic fragment or variant thereof and
[0223] the polypeptide of SEQ ID NO:2 or an antigenic fragment or variant thereof.

[0224] Highly preferred compositions include:

[0225] A composition comprising:
[0226] the polypeptide of SEQ ID NO:16 or an antigenic fragment or variant thereof and
[0227] any of the polypeptides of SEQ ID NO:1-282 or an antigenic fragment or variant thereof, preferably any of SEQ ID NO:1-41 or an antigenic fragment or variant thereof, more preferably a polypeptide selected from the group consisting of SEQ ID NO:10, SEQ ID NO:13, SEQ ID NO:20 and SEQ ID NO:28, most preferably the polypeptide of SEQ ID NO:20 or an antigenic fragment or variant thereof.

[0228] A composition comprising:
[0229] the polypeptide of SEQ ID NO:10 or an antigenic fragment or variant thereof and
[0230] any of the polypeptides of SEQ ID NO:1-282 or an antigenic fragment or variant thereof, preferably any of SEQ ID NO:1-41 or an antigenic fragment or variant thereof, more preferably a polypeptide selected from the group consisting of SEQ ID NO:13, SEQ ID NO:20 and SEQ DI NO:28, most preferably the polypeptide of SEQ ID NO:20 or an antigenic fragment or variant thereof.

[0231] A composition comprising:
[0232] the polypeptide of SEQ ID NO:13 or an antigenic fragment or variant thereof and
[0233] any of the polypeptides of SEQ ID NO:1-282 or an antigenic fragment or variant thereof, preferably any of SEQ ID NO:1-41 or an antigenic fragment or variant thereof, more preferably a polypeptide selected from the group consisting of SEQ ID NO:20 and SEQ ID NO:28, most preferably the polypeptide of SEQ ID NO:20 or an antigenic fragment or variant thereof.

[0234] A composition comprising:
[0235] the polypeptide of SEQ ID NO:28 or an antigenic fragment or variant thereof and
[0236] any of the polypeptides of SEQ ID NO:1-282 or an antigenic fragment or variant thereof, preferably any of SEQ ID NO:1-41 or an antigenic fragment or variant thereof, the polypeptide of SEQ ID NO:20 or an antigenic fragment or variant thereof.

[0237] Preferred compositions comprising at least three polypeptides include the following:

[0238] A composition comprising three or more polypeptides selected from the group consisting of SEQ ID NO:10, SEQ ID NO:13, SEQ ID NO:16, SEQ ID NO:20 and SEQ ID NO:28.

[0239] A composition comprising:
[0240] the polypeptide of SEQ ID NO:16 or an antigenic fragment or variant thereof
   and
[0241] the polypeptide of SEQ ID NO:20 or an antigenic fragment or variant thereof
   and
[0242] any of the polypeptides of SEQ ID NO:1-282 or an antigenic fragment or variant thereof, preferably any of SEQ ID NO:1-41 or an antigenic fragment or variant thereof, more preferably a polypeptide selected from the group consisting of SEQ ID NO:10, SEQ ID NO:13 and SEQ ID NO:28.

[0243] Further preferred compositions according to the invention, comprising four or more polypeptides selected from the group consisting of SEQ ID NO:10, SEQ ID NO:13, SEQ ID NO:16, SEQ ID NO:20 and SEQ ID NO. 28.

[0244] In a yet further preferred embodiment, the composition of the invention comprises the five polypeptides of SEQ ID NO:10, SEQ ID NO:13, SEQ ID NO:16, SEQ ID NO:20 and SEQ ID NO. 28.

[0245] In some embodiments of the above compositions comprising two or more polypeptides, the polypeptides are not covalently linked. In other embodiments, however, the polypeptides may form a fusion polypeptide, which is formed by post-translational linkage or generated from a single fused open reading frame. In either case, the two or more polypeptides may be linked directly or via a spacer or linker domain, which e.g. may be a peptide linker, preferably a protease-resistant and/or non-immunogenic peptide linker. Such a peptide linker may be of any length, e.g. it may be between 2 and 200, such as between 5 and 50 amino acids in length.

### Vaccines Comprising Polypeptides

[0246] As described above, in a preferred embodiment, the invention relates to a composition comprising a polypeptide which comprises a sequence selected from the group consisting of SEQ ID NO:1-282, or an antigenic fragment or variant of said sequence, for use as a vaccine. Preferred fragments and variants are those described in the sections herein that relate to fragments and variants.

[0247] Accordingly, in this embodiment, the antigenicity or immunogenicity is provided by direct administration of a polypeptide normally located on the surface of a Streptococcus pneumoniae cell. In one particular embodiment, the polypeptides are selected so that the vaccine composition comprises multiple polypeptides capable of associating with different MHC molecules, such as different MHC class I molecules. Preferably, the composition for use as a vaccine comprises polypeptides and/or fragments capable of associating with the most frequently occurring MHC class I molecules. In one particular embodiment of the invention, the composition comprises one or more polypeptides and/or fragments capable of associating to an MHC class I molecule and one or more polypeptides and/or fragments capable of associating with an MHC class II molecule. Hence, the vaccine composition is in some embodiments capable of raising a specific cytotoxic T-cells response and/or a specific helper T-cell response. Association to MHC molecules can e.g. be determined as described by Andersen et al. (1999) Tissue Antigens 54:185; or by Tan et al. (1997) J. Immunol. Methods 209:25.

### Adjuvants and Immunogenic Carriers

[0248] Preferably, the composition for use as vaccine, i.e. the vaccine composition, of the present invention comprises a pharmaceutically-acceptable carrier as described herein in the section ‘Compositions for use in the invention’.

[0249] The composition can further comprise an adjuvant. Adjuvants are substances whose admixture into the vaccine composition increases or otherwise modifies the immune response to a polypeptide or other antigen. Adjuvants could for example be any of: AlK(SO₄)₂, AlNa(SO₄)₂, AlNH₄ (SO₄), silica, alum, Al(OH)₃, Ca₃ (PO₄)₂, kaolin, carbon, aluminium hydroxide, aluminium phosphate, muramyl dipeptides, N-acetyl-muramyl-L-threonyl-D-isoglutamine (thr-DMP), N-acetyl-nornuramyl-Lalanyl-D-iso-glutamine (CGP 11687, also referred to as nor-MDP), N-acetylmuramyl-L-alanyl-D-isoglutaminyl-L-alanine-2-(1′2′-dipalmitoyl-sn-glycero-3-hydroxphosphoryl oxy)-ethylamine (CGP 19835A, also referred to as MTP-PE), RIBI (MPL+TDM+CWS) in a 2% squalene/Tween-80® emulsion, lipopolysaccharides and derivatives, including lipid A, Freund's Complete Adjuvant (FCA), Freund's Incomplete Adjuvants, Merck Adjuvant 65, polynucleotides (for example, poly IC and poly AU acids), wax D from Mycobacterium, tuberculosis, substances found in Corynebacterium parvum, Bordetella pertussis, and members of the genus Brucella, liposomes or other lipid emulsions, Titermax, ISCOMS, Quil A, ALUN (see U.S. Pat. Nos. 58,767 and 5,554,372), Lipid A derivatives, choleratoxin derivatives, HSP derivatives, LPS derivatives, synthetic peptide matrixes or GMDP, Interleukin 1, Interleukin 2, Montanide ISA-51 and QS-21. Preferred adjuvants to be used with the invention include alum, Montanide ISA-51 and QS-21. Montanide ISA-51 (Seppic, Inc.) is a mineral oil-based adjuvant analogous to incomplete Freund's adjuvant, which is normally administered as an emulsion. QS-21 (Antigenics; Aquila Biopharmaceuticals, Framingham, Mass.) is a highly purified, water-soluble saponin that handles as an aqueous solution. Another preferred adjuvant to be used in the composition of the invention is IMSAVAC-L from the Netherlands Vaccine Institute. In another preferred embodiment, the polypeptide or polypeptides are included in virosomes.

[0250] Desirable functionalities of adjuvants capable of being used in accordance with the present invention are listed in the below table.

TABLE 1
Modes of adjuvant action

| Action | Adjuvant type | Benefit |
|---|---|---|
| 1. Immunomodulation | Generally small molecules or proteins which modify the | Upregulation of immune response. Selection of Th1 or |
| | cytokine network | Th2 |
| 2. Presentation | Generally amphipathic molecules or complexes which | Increased neutralizing antibody response. Greater |
| | interact with immunogen in its native conformation | duration of response |
| 3. CTL Induction | Particles which can bind or enclose immunogen and | Cytosolic processing of protein yielding correct class |
| | which can fuse with or disrupt cell membranes | 1 restricted peptides |
| | w/o emulsions for direct attachment of peptide to cell | Simple process if promiscuous peptide(s) known |
| | surface MHC-1 | |
| 4. Targeting | Particulate adjuvants which bind immunogen. Adjuvants | Efficient use of adjuvant and immunogen |
| | which saturate Kupffer cells | |
| | Carbohydrate adjuvants which target lectin receptors on | As above. May also determine type of response if |
| | macrophages and DCs | targeting selective |
| 5. Depot generation | w/o emulsion for short term | Efficiency |
| | Microspheres or nanospheres for long term | Potential for single-dose vaccine |

[0251] Source: John C. Cox and Alan R. Coulter Vaccine 1997 February; 15(3):248-56
   A vaccine composition according to the present invention may comprise more than one different adjuvant. It is also contemplated that the Streptococcus pneumoniae polypeptide of the invention, or one or more antigenic fragments thereof, and the adjuvant can be administered separately in any appropriate sequence.

[0252] The adjuvant of choice may e.g. Freund's complete or incomplete adjuvant, or killed B. pertussis organisms, used e.g. in combination with alum precipitated antigen. A general discussion of adjuvants is provided in Goding, Monoclonal Antibodies: Principles & Practice (2nd edition, 1986) at pages 61-63. Goding notes, however, that when the antigen of interest is of low molecular weight, or is poorly immunogenic, coupling to an immunogenic carrier is recommended (see below). Various saponin extracts and cytokines have also been suggested to be useful as adjuvants in immunogenic compositions. Recently, it has been proposed to use granulocyte-macrophage colony stimulating factor (GM-CSF), a well known cytokine, as an adjuvant (WO 97/28816).

[0253] In addition, a vaccine composition of the invention can comprise an immunogenic carrier such as a scaffold structure, for example a protein or a polysaccharide, to which the Streptococcus pneumoniae polypeptide or the fragment thereof is capable of being associated. A Streptococcus pneumoniae polypeptide, or the antigenic fragment or variant thereof, present in the vaccine composition can thus be associated with an immunogenic carrier such as e.g. a protein. The binding or association of the polypeptide to a carrier protein may be covalent or non-covalent. An immunogenic carrier protein may be present independently of an adjuvant. The function of a carrier protein can for example be to increase the molecular weight of in particular fragments in order to increase their activity or immunogenicity, to confer stability, to increase the biological activity, or to increase serum half-life. Furthermore, an immunogenic carrier protein may aid presenting the Streptococcus pneumoniae polypeptide or the fragments thereof to T cells. A carrier protein could be, but is not limited to, keyhole limpet hemocyanin, serum proteins such as transferrin, bovine serum albumin, human serum albumin, thyroglobulin or ovalbumin, Immunoglobulins, or hormones, such as insulin. Tetanus toxoid and/or diphtheria toxoid are also suitable carriers in one embodiment of the invention. Alternatively or additionally, dextrans, for example sepharose may be added. In yet another embodiment, an antigen-presenting cell such as e.g. a dendritic cell capable of presenting the polypeptide or a fragment thereof to a T cell may be added to obtain the same effect as a carrier protein. Methods for the preparation of vaccine compositions have e.g. been described in U.S. Pat. No. 5,470,958 and references therein.

[0254] In a further embodiment, the vaccine composition of the invention may comprise Streptococcus pneumoniae carbohydrates in addition to a polypeptide of the invention. In one embodiment, the added carbohydrates are carbohydrates derived from or characteristic of one or more serotypes of Streptococcus pneumoniae. In a preferred embodiment, the polypeptide of the invention is combined with polysaccharides derived from or characteristic of any one or more of the serotypes given in Table 4. In a preferred embodiment, the polypeptide is combined with one or more, preferably two, three, four, five, six or seven polysaccharides derived from or characteristic of serotype 4, 6B, 9V, 14, 18C, 19F and 23F. In another embodiment, the polypeptide is combined with eight or more, preferably ten or more, 15 or more, or 20 or more of the polysaccharide antigens of serotypes 1, 2, 3, 4, 5, 6B, 7F, 8, 9N, 10A, 11A, 12F, 14, 15B, 17F, 18C, 19A, 19F, 20, 22F, 23F, and 33F. These carbohydrates may added in free form to the vaccine composition of the invention, or, alternatively, they may be fused to a polypeptide of the invention to be used in the vaccine composition.

[0255] An effective amount of a polypeptide of the invention may be an amount capable of eliciting a detectable humoral immune response in the absence of an immunomodulator. The appropriate amount of immunogen to be used is dependent on the immunological response it is desired to elicit. Furthermore, the exact effective amount necessary may vary from subject to subject, depending on the species, age and general condition of the subject, the severity of the condition being treated, the mode of administration, etc. The polypeptide vaccines of the present invention may be administered in various dosages, including dosages that are lower than those normally used for other vaccines. This possible because the polypeptides of the present invention are abundant on the surface of a Streptococcus pneumoniae cell and thus even a fairly low level of response can provide immunity. Thus, dosage of a polypeptide of the invention, when used for immunisation, may e.g. be from 0.1 to 500 micrograms per kilogram body weight, such as from 0.1 to 100 micrograms, e.g. from 0.1 to 50 micrograms, such as from 0.1 to 25 micrograms, such as in the range of from 8 to 25 micrograms per kilogram body weight, or less than that, such as from 0.1 to 5 micrograms or from 0.1 to 2 micrograms per kilograms body weight.

### DNA Vaccine Compositions and Vaccine Compositions Comprising Recombinant Viruses or Recombinant Cells

[0256] DNA or RNA vaccines pertain to the introduction of e.g. an antigenic polypeptide determinant into a patient by overexpressing in the cells of the patient, a polynucleotide construct which includes expression control sequences operably linked to a sequence encoding the polypeptide of interest, herein a polypeptide of any of SEQ ID NO:1-282 or an antigenic fragment or variant thereof, preferably the polypeptide of SEQ ID NO:16 or an antigenic fragment or variant thereof. As such fragments may not contain a methionine start codon, such a codon is optionally included as part of the expression control sequences. The polynucleotide construct may be a non-replicating and linear polynucleotide, a circular expression vector, or an autonomously replicating plasmid or viral expression vector. The construct may become integrated into the host genome. Any expression vector that can transfect a mammalian cell may be used in the methods of immunising an individual according to the present invention. Methods for constructing expression vectors are well known in the art (see, e.g., Molecular Cloning: A Laboratory Manual, Sambrook et al., eds., Cold Spring Harbor Laboratory, 2nd Edition, Cold Spring Harbor, N.Y., 1989). Preferred are compositions comprising a plurality of genes expressing multiple polypeptides selected from SEQ ID NO:1-282 and/or multiple antigenic fragments of the invention, thereby permitting simultaneous vaccination using a variety of preselected targets.

[0257] Vaccines can also be prepared by incorporating a polynucleotide encoding a specific antigenic polypeptide of interest into a living but harmless vector, such as a virus or a cell, such as an attenuated or reduced-virulence E. coli or Salmonella cell. The harmless recombinant virus or recombinant cell is injected into the intended recipient. Such a recombinant cell may be dead or alive. If alive, the recombinant organism may replicate in the host while producing and presenting the antigenic polypeptide to the host's immune system. It is contemplated that this type of vaccine may be more effective than the non-replicative type of vaccine. For such a vaccine to be successful, the vector organism must be viable, and either be naturally non-virulent or have an attenuated or reduced-virulence phenotype.

[0258] Strategies for vaccination using attenuated bacteria and suitable bacterial strains for use therein have been described in e.g. Makino et al. (2001) Microb. Pathog. 31:1-8; Gentschev et al. (2002) Int. J. Med. Microbiol. 291:577-582; Turner et al. (2001) Infect. Immun. 69:4969-4979; WO99/49026; and WO03/022307.

[0259] Further examples of vectors that can be applied are vectors comprising e.g., retroviruses, as disclosed in WO 90/07936, WO 91/02805, WO 93/25234, WO 93/25698, and WO 94/03622, adenovirus, as disclosed by Berkner, Biotechniques 6:616-627, 1988; Li et al., Hum. Gene Ther. 4:403-409, 1993; Vincent et al., Nat. Genet. 5:130-134, 1993; and Kolls et al., Proc. Natl. Acad. Sci. USA 91:215-219, 1994), pox virus, as disclosed by U.S. Pat. No. 4,769,330; U.S. Pat. No. 5,017,487; and WO 89/01973, naked DNA as disclosed WO 90/11092, a polynucleotide molecule complexed to a polycationic molecule as disclosed in WO 93/03709, and polynucleotides associated with liposomes as disclosed by Wang et al., Proc. Natl. Acad. Sci. USA 84:7851, 1987. In certain embodiments, the DNA may be linked to killed or inactivated adenovirus as disclosed by Curiel et al., Hum. Gene Ther. 3:147-154, 1992; Cotton et al., Proc. Natl. Acad. Sci. USA 89:6094, 1992. Other suitable compositions include DNA-ligands as disclosed by Wu et al., J. Biol. Chem. 264:16985-16987, 1989), and lipid-DNA combinations as disclosed by Felgner et al., Proc. Natl. Acad. Sci. USA 84:7413-7417, 1989). In addition, the efficiency of naked DNA uptake into cells may be increased by coating the DNA onto biodegradable latex beads.

[0260] Vaccine vectors preferably comprise a suitable promoter which is operably linked to the polynucleotide sequence encoding the immunogenic polypeptide. Any promoter that can direct a high level of transcription initiation in the target cells may be used in the invention. Non-tissue specific promoters, such as the cytomegalovirus (DeBemardi et al., Proc Natl Acad Sci USA 88:9257-9261 [1991], and references therein), mouse metallothionine I (Hammer et al., J Mol Appl Gen 1:273-288 [1982]), HSV thymidine kinase (McKnight, Cell 31:355-365 [1982]), and SV40 early (Benoist et al., Nature 290:304-310 [1981]) promoters may thus also be used.

### Methods of Vaccination and Use for Vaccination/Immunisation

[0261] In a further main aspect, the present invention relates to the use of a composition comprising any one or more of
[0262] a polypeptide which comprises a sequence selected from the group consisting of SEQ ID NO:1-282, or comprises an antigenic fragment or variant of said sequence,
[0263] a polynucleotide comprising a sequence encoding said polypeptide,
[0264] an expression vector comprising a sequence encoding said polypeptide, or
[0265] a recombinant virus or recombinant cell comprising said polynucleotide or said expression vector,
   for the preparation of a medicament for the immunisation of an animal or human being against bacterial infections. The immunisation preferably induces a protective immune response. In one embodiment of the above use, the medicament is only given once.

[0266] In a preferred embodiment, the medicament is for the immunisation against Streptococcus infections. Most preferably, the medicament is for immunisation against Streptococcus pneumoniae. Immunisation with a Streptococcus pneumoniae polypeptide can, however, also give cross-protection to other bacterial species. This normally requires significant homology to at least a portion of a polypeptide of the other species. Such homology is e.g. found between SEQ ID NO:16 and variants thereof from Streptococcus pyogenes (group A Streptococcus) (SEQ ID NO:283), Streptococcus agalactiae (group B Streptococcus) (SEQ ID NO:284) and Listeria monocytogenes (SEQ ID NO:285). Similarly, homology is found between SEQ ID NO:20 and variants thereof from Streptococcus pyogenes (group A Streptococcus) (SEQ ID NO:286), Streptococcus agalactiae (group B Streptococcus) (SEQ ID NO:287) and Listeria monocytogenes (SEQ ID NO:288).

[0267] Accordingly, the medicament is in some embodiments used for the immunisation against one or more of: Streptococcus pyogenes (group A Streptococcus), Streptococcus agalactiae (group B Streptococcus) and Listeria monocytogenes. Highly preferred polypeptides for use in the preparation of such a medicament are SEQ ID NO:16 and SEQ ID NO:20.

[0268] An alternative strategy for immunisation against one or more bacteria is to immunise with a medicament comprising the variant polypeptide. Accordingly, in a further embodiment, the polypeptide used for the preparation of the medicament is a variant of any of SEQ ID NO:1-282, preferably a variant of SEQ ID NO:16 and/or a variant of SEQ ID NO:20. Most preferably, the polypeptide is selected from the group consisting of SEQ ID NO:283, SEQ ID NO:284, SEQ ID NO:285, SEQ ID NO:286, SEQ ID NO:287 and SEQ ID NO:288, or a fragment thereof or a variant thereof, e.g. a variant having more than 95%, such as more than 98% sequence identity to SEQ ID NO:283, SEQ ID NO:284, SEQ ID NO:285, SEQ ID NO:286, SEQ ID NO:287 or SEQ ID NO:288.

[0269] Accordingly, in some embodiments:
[0270] a medicament comprising SEQ ID NO:283 and/or SEQ ID NO:286, or a fragment or variant of any of these two, is used to immunise against Streptococcus pyogenes and/or Streptococcus pneumoniae and/or other bacteria;
[0271] a medicament comprising SEQ ID NO:284 and/or SEQ ID NO:287, or a fragment or a variant of any of these two, is used to immunise against Streptococcus agalactiae and/or Streptococcus pneumoniae and/or other bacteria
   or
[0272] a medicament comprising SEQ ID NO:285 and/or SEQ ID NO:288, or a fragment or a variant of any of these two, is used immunise against Listeria monocytogenes and/or Streptococcus pneumoniae and/or other bacteria

[0273] In the most preferred embodiment, the composition herein comprises or further comprises
[0274] a polypeptide which comprises SEQ ID NO:16, or comprises an antigenic fragment or variant of SEQ ID NO:16,
[0275] a polynucleotide comprising a sequence encoding said polypeptide,
[0276] an expression vector comprising a sequence encoding said polypeptide, or
[0277] a recombinant virus or recombinant cell comprising said polynucleotide or said expression vector.

[0278] In another preferred embodiment, the composition herein comprises or further comprises
[0279] a polypeptide which comprises SEQ ID NO:10, or comprises an antigenic fragment or variant of SEQ ID NO:10,
[0280] a polynucleotide comprising a sequence encoding said polypeptide,
[0281] an expression vector comprising a sequence encoding said polypeptide, or a recombinant virus or recombinant cell comprising said polynucleotide or said expression vector.

[0282] In another preferred embodiment, the composition herein comprises or further comprises
[0283] a polypeptide which comprises SEQ ID NO:13, or comprises an antigenic fragment or variant of SEQ ID NO:13,
[0284] a polynucleotide comprising a sequence encoding said polypeptide,
[0285] an expression vector comprising a sequence encoding said polypeptide, or
[0286] a recombinant virus or recombinant cell comprising said polynucleotide or said expression vector.

[0287] In another preferred embodiment, the composition herein comprises or further comprises
[0288] a polypeptide which comprises SEQ ID NO:28, or comprises an antigenic fragment or variant of SEQ ID NO:28,
[0289] a polynucleotide comprising a sequence encoding said polypeptide,
[0290] an expression vector comprising a sequence encoding said polypeptide, or
[0291] a recombinant virus or recombinant cell comprising said polynucleotide or said expression vector.

[0292] In another preferred embodiment, the composition further comprises
[0293] a polypeptide which comprises SEQ ID NO:20, or comprises an antigenic fragment or variant of SEQ ID NO:20,
[0294] a polynucleotide comprising a sequence encoding said polypeptide,
[0295] an expression vector comprising a sequence encoding said polypeptide, or
[0296] a recombinant virus or recombinant cell comprising said polynucleotide or said expression vector.

[0297] Similarly, the invention relates to a method for the immunisation of an animal or human being against a Streptococcus pneumoniae infections comprising the step of administering any one or more of
[0298] a polypeptide which comprises any of the sequences of SEQ ID NO:1-282, or comprises a fragment or variant of any of said sequences,
[0299] a polynucleotide comprising a sequence encoding said polypeptide,
[0300] an expression vector comprising a sequence encoding said polypeptide, or
[0301] a recombinant virus or recombinant cell comprising said polynucleotide or said expression vector,
   thereby immunising said animal or human being against Streptococcus pneumoniae infections.

[0302] In one embodiment of the above method for immunisation, said
[0303] polypeptide which comprises any of the sequences of SEQ ID NO:1-282, preferably SEQ ID NO:16, or comprises a fragment or variant of any of said sequences,
[0304] polynucleotide comprising a sequence encoding said polypeptide,
[0305] expression vector comprising a sequence encoding said polypeptide, or
[0306] recombinant virus or recombinant cell comprising said polynucleotide or said expression vector,
   is only given once, thereby immunising said animal or human being against Streptococcus pneumoniae infections through a single administration.
   The animal may be any bird or mammal, e.g. a chicken, duck, turkey, cow or pig. Particular target populations of human beings may be individuals from at-risk populations, such as the population of children up to 4 years old, the population of elderly persons or the population of naive or semi-immune travelers to the developing world.

[0307] Because the polypeptides of the present invention are immunogenic and because they are abundant on the Streptococcus pneumoniae cell, a protective immune response can be induced even patients with a reduced ability to respond to antigenic stimuli, such as juveniles, elderly patients or immunocompromised patients. Furthermore, for the same reasons, the vaccines of the invention can also be used to prevent otitis media, to prevent nasopharyngal carriage of Streptococcus pneumoniae, to prevent sepsis caused by Streptococcus pneumoniae, or to prevent meningitis caused by Streptococcus pneumoniae.

[0308] Thus, in one embodiment, the present invention relates to the use of any one or more of
[0309] a polypeptide which comprises a sequence selected from the group consisting of SEQ ID NO:1-282, preferably SEQ ID NO:16, or comprises an antigenic fragment or variant of said sequence,
[0310] a polynucleotide comprising a sequence encoding said polypeptide,
[0311] an expression vector comprising a sequence encoding said polypeptide, or
[0312] a recombinant virus or recombinant cell comprising said polynucleotide or said expression vector,
   for the preparation of a medicament for the immunisation of an animal or human being against Streptococcus pneumoniae infections, wherein said human being is a child of less than 4 yours of age, such as less than 2 years of age, e.g. less than 1 year of age, and/or a child having maternal immunity (i.e. having maternal antibodies in circulation).

[0313] In a further embodiment, the present invention relates to the use of any one or more of
[0314] a polypeptide which comprises a sequence selected from the group consisting of SEQ ID NO:1-282, preferably SEQ ID NO:16, or comprises an antigenic fragment or variant of said sequence,
[0315] a polynucleotide comprising a sequence encoding said polypeptide,
[0316] an expression vector comprising a sequence encoding said polypeptide, or
[0317] a recombinant virus or recombinant cell comprising said polynucleotide or said expression vector,
   for the preparation of a medicament for the immunisation of an animal or human being against Streptococcus pneumoniae infections, wherein said human being is an immunocompromised patient. Immunocompromised patients could e.g. patients taking immunosuppressive chemotherapy or patients with congenital or acquired immune deficiency. For the immunisation to be effective in these patients, it is required that the patient still to some extent is capable of producing an immune response.

[0318] In another embodiment, the present invention relates to the use of any one or more of
[0319] a polypeptide which comprises a sequence selected from the group consisting of SEQ ID NO:1-282, preferably SEQ ID NO:16, or comprises an antigenic fragment or variant of said sequence,
[0320] a polynucleotide comprising a sequence encoding said polypeptide,
[0321] an expression vector comprising a sequence encoding said polypeptide, or a recombinant virus or recombinant cell comprising said polynucleotide or said expression vector,
   for the preparation of a medicament for the prevention of otitis media, in particular otitis media due to Streptococcus pneumoniae.

[0322] In yet another embodiment, the present invention relates to the use of any one or more of
[0323] a polypeptide which comprises a sequence selected from the group consisting of SEQ ID NO:1-282, preferably SEQ ID NO:16, or comprises an antigenic fragment or variant of said sequence,
[0324] a polynucleotide comprising a sequence encoding said polypeptide,
[0325] an expression vector comprising a sequence encoding said polypeptide, or
[0326] a recombinant virus or recombinant cell comprising said polynucleotide or said expression vector,
   for the preparation of a medicament for the treatment and/or prevention of nasopharyngal carriage of Streptococcus pneumoniae.

[0327] In an even further embodiment, the present invention relates to the use of any one or more of
[0328] a polypeptide which comprises a sequence selected from the group consisting of SEQ ID NO:1-282, preferably SEQ ID NO:16, or comprises an antigenic fragment or variant of said sequence,
[0329] a polynucleotide comprising a sequence encoding said polypeptide,
[0330] an expression vector comprising a sequence encoding said polypeptide, or
[0331] a recombinant virus or recombinant cell comprising said polynucleotide or said expression vector,
   for the preparation of a medicament for the prevention of Streptococcal meningitis.

[0332] The vaccines may be administered in the dosages described herein by any suitable mode of administration, including modes of administration that result in a less than complete (e.g. less than 50% or less than 90%) uptake of all administered antigen. This is possible because the polypeptides of the present invention are sufficiently immunogenic and because, due to their abundance on the surface of the Streptococcus pneumoniae cell, even a somewhat suboptimal response, can provide immunity. Thus, modes of administration of the composition according to the invention include, but are not limited to systemic administration, such as intravenous or subcutaneous administration, transdermal administration, intradermal administration, intramuscular administration, intranasal administration, oral administration, and generally any form of mucosal administration.

[0333] An important problem relating to the production of effective Streptococcus vaccines is the occurrence of immunologically different types, also termed serotypes, of the bacteria. These types differ considerably in their polysaccharide profile and also, albeit less, in some highly variable proteins. Due to such variability, vaccines known in the art often only work against some and not all serotypes.

[0334] The vaccines of the present invention are based on abundant surface-located polypeptides, which are not highly variable. These vaccines will be effective against a plurality of serotypes. Accordingly, in one embodiment, the invention relates to the use of any one or more of
[0335] a polypeptide which comprises a sequence selected from the group consisting of SEQ ID NO:1-282, preferably selected from the group consisting of SEQ ID NO:1-41, most preferably SEQ ID NO:16, or comprises an antigenic fragment or variant of said sequence,
[0336] a polynucleotide comprising a sequence encoding said polypeptide,
[0337] an expression vector comprising a sequence encoding said polypeptide, or
[0338] a recombinant virus or recombinant cell comprising said polynucleotide or said expression vector,
   for the preparation of a medicament for the immunisation of an animal or human being against more than one serotype of Streptococcus pneumoniae, such as 5 or more different serotypes, e.g. 8 or more different serotypes, such as 15 or more different serotypes, e.g. 24 or more different serotypes.

[0339] Preferably, said more than one serotype includes a serotype selected from the group of 6A, 7C, 9A, 10B, 13, 15C, 16F, 18B, 21, 23A, 24F, 28F, 31, 34, 35F, 35B, 38.

[0340] In one preferred embodiment, the medicament is used for the immunisation against at least the serotypes 4, 6B, 9V, 14, 18C, 19F and 23F, and, preferably, furthermore at least one further serotype, said further serotype preferably being selected from the group of 6A, 7C, 9A, 10B, 13, 15C, 16F, 18B, 21, 23A, 24F, 28F, 31, 34, 35F, 35B, 38.

[0341] In another preferred embodiment, the medicament is used for the immunization against at least the serotypes 1, 2, 3, 4, 5, 6B, 7F, 8, 9N, 9V, 10A, 11A, 12F, 14, 15B, 17F, 18C, 19A, 19F, 20, 22F, 23F, and 33F, and preferably at least one further serotype, preferably selected from the group of 6A, 7C, 9A, 10B, 13, 15C, 16F, 18B, 21, 23A, 24F, 28F, 31, 34, 35F, 35B, 38.

[0342] In a further preferred embodiment, the medicament is used for the immunisation against any of the serotypes given in Table 4, preferably at least 5 or more different serotypes selected from the serotypes given in Table 4, e.g. 8 or more different serotypes, such as 15 or more different serotypes, e.g. 24 or more different serotypes selected from the serotypes given in Table 4.

[0343] The immunogenic effect according to the present invention can e.g. be measured by assay of antibodies in serum samples e.g. by a RIA. Furthermore, the effect can be determined in vivo, by measuring e.g. an increased T-cell responsiveness to T-cell dependent antigenic polypeptides, wherein said increased responsiveness is characteristic of an enhancement of a normal immune response to such antigenic polypeptides. An immunostimulating effect may also be measured as an enhanced T cell production of, in particular, IL-2, IL-3, IFN-γ and/or GM-CSF. Polypeptides or fragments thereof having a potential for eliciting an enhanced immune response may thus be readily identified by screening for enhanced IL-2, IL-3, IFN-γ or GM-CSF production by T cells, as described e.g. in U.S. Ser. No. 07/779,499, incorporated herein by reference.

[0344] A number of aspects related to vaccination against Streptococcus pneumoniae have been discussed in Bogaert et al. (2004) Vaccine 22:2209-2220. This review includes references to other documents describing methods for testing and evaluation of such vaccines.

[0345] The herein described polynucleotides and expression vectors can be introduced into target cells in vivo or in vitro by any standard method: e.g., as naked DNA (Donnelly et al., Annu Rev Immunol 15:617-648 [1997]), incorporated into ISCOMS, liposomes, or erythrocyte ghosts, or by biolistic transfer, calcium precipitation, or electroporation. Alternatively, one can employ a viral-based vector as a means for introducing the polynucleotide encoding the polypeptide of interest Into the cells of the animal or human being. Preferred viral vectors include those derived from replication-defective hepatitis viruses (e.g., HBV and HCV), retroviruses (see, e.g., WO89/07136; and Rosenberg et al., N Eng J Med 323 (9):570-578 [1990]), adenovirus (see, e.g., Morsey et al., J Cell Biochem, Supp. 17E [1993]), adeno-associated virus (Kotin et al., Proc Natl Acad Sci USA 87:2211-2215 [1990]), replication defective herpes simplex viruses (HSV; Lu et al., Abstract, page 66, Abstracts of the Meeting on Gene Therapy, Sep. 22-26, 1992, Cold Spring Harbor Laboratory, Cold Spring Harbor, N.Y.), canary pox virus, and any modified versions of these vectors. Cells transfected in vitro can be cultured and cloned, if desired, prior to introduction into the patient.

[0346] In addition to direct in vivo procedures, ex vivo procedures may be used in which cells are removed from an animal, modified, and placed into the same or another animal. It will be evident that one can utilise any of the compositions noted above for introduction of an antigenic polypeptides or polynucleotides encoding such according to the invention into tissue cells in an ex vivo context. Protocols for viral, physical and chemical methods of uptake are well known in the art. Thus, as an alternative to administration of a polypeptide of the invention or a vector capable of expressing such a polypeptide directly to the patient, one can remove helper T cells from the patient; stimulate those T cells ex vivo using the same antigenic polypeptide or vector; and introduce the stimulated helper T cells into the same patient.

### Antibodies and Methods for Raising Antibodies of the Invention

[0347] In a further main embodiment, the composition for use as a medicament comprises an antibody capable of binding a polypeptide selected from the group consisting of surface-located Streptococcus pneumoniae polypeptides of SEQ ID NO:1-282, preferably selected from the group consisting of SEQ ID NO:1-41, more preferably selected from the group consisting of SEQ ID NO:16, SEQ ID NO:10, SEQ ID NO:13, SEQ ID NO:20, SEQ ID NO:26, SEQ ID NO:28 and SEQ ID NO:33, most preferably the polypeptide of SEQ ID NO:16. Such a medicament can be used for antibody therapy, such as passive immunisation of an individual in need thereof.

[0348] Accordingly, in a further main aspect, the invention relates to antibodies capable of binding, preferably specifically binding, a polypeptide selected from the group consisting of SEQ ID NO:1-282 and/or a fragment and/or a variant thereof ‘Specifically binding’ is, in this context, not intended to mean absolute specificity. The antibody may in some embodiments also specifically bind polypeptides, e.g. from other Streptococcus species, with a high degree of sequence identity to the polypeptide from Streptococcus pneumoniae, e.g. polypeptides with more than 90%, such as more than 95% or more than 98% sequence identity to the polypeptide from Streptococcus pneumoniae.

[0349] In a preferred embodiment, the antibody is capable of binding, preferably specifically binding, a polypeptide selected from the group consisting of SEQ ID NO:1-282, such as the polypeptide of SEQ ID NO:1, for example the polypeptide of SEQ ID NO:2, such as the polypeptide of SEQ ID NO:3, for example the polypeptide of SEQ ID NO:4, such as the polypeptide of SEQ ID NO:5, for example the polypeptide of SEQ ID NO:6, such as the polypeptide of SEQ ID NO:7, for example the polypeptide of SEQ ID NO:8, such as the polypeptide of SEQ ID NO:9, for example the polypeptide of SEQ ID NO:10, such as the polypeptide of SEQ ID NO:11, for example the polypeptide of SEQ ID NO:12, such as the polypeptide of SEQ ID NO:13, for example the polypeptide of SEQ ID NO:14, such as the polypeptide of SEQ ID NO:15, for example the polypeptide of SEQ ID NO:16, such as the polypeptide of SEQ ID NO:17, for example the polypeptide of SEQ ID NO:18, such as the polypeptide of SEQ ID NO:19, for example the polypeptide of SEQ ID NO:20, such as the polypeptide of SEQ ID NO:21, for example the polypeptide of SEQ ID NO:22, such as the polypeptide of SEQ ID NO:23, for example the polypeptide of SEQ ID NO:24, such as the polypeptide of SEQ ID NO:25, for example the polypeptide of SEQ ID NO:26, such as the polypeptide of SEQ ID NO:27, for example the polypeptide of SEQ ID NO:28, such as the polypeptide of SEQ ID NO:29, for example the polypeptide of SEQ ID NO:30, such as the polypeptide of SEQ ID NO:31, for example the polypeptide of SEQ ID NO:32, such as the polypeptide of SEQ ID NO:33, for example the polypeptide of SEQ ID NO:34, such as the polypeptide of SEQ ID NO:35, for example the polypeptide of SEQ ID NO:36, such as the polypeptide of SEQ ID NO:37, for example the polypeptide of SEQ ID NO:38, such as the polypeptide of SEQ ID NO:39, for example the polypeptide of SEQ ID NO:40, such as the polypeptide of SEQ ID NO:41, for example the polypeptide of SEQ ID NO:42, such as the polypeptide of SEQ ID NO:43, for example the polypeptide of SEQ ID NO:44, such as the polypeptide of SEQ ID NO:45, for example the polypeptide of SEQ ID NO:46, such as the polypeptide of SEQ ID NO:47, for example the polypeptide of SEQ ID NO:48, such as the polypeptide of SEQ ID NO:49, for example the polypeptide of SEQ ID NO:50, such as the polypeptide of SEQ ID NO:51, for example the polypeptide of SEQ ID NO:52, such as the polypeptide of SEQ ID NO:53, for example the polypeptide of SEQ ID NO:54, such as the polypeptide of SEQ ID NO:55, for example the polypeptide of SEQ ID NO:56, such as the polypeptide of SEQ ID NO:57, for example the polypeptide of SEQ ID NO:58, such as the polypeptide of SEQ ID NO:59, for example the polypeptide of SEQ ID NO:60, such as the polypeptide of SEQ ID NO:61, for example the polypeptide of SEQ ID NO:62, such as the polypeptide of SEQ ID NO:63, for example the polypeptide of SEQ ID NO:64, such as the polypeptide of SEQ ID NO:65, for example the polypeptide of SEQ ID NO:66, such as the polypeptide of SEQ ID NO:67, for example the polypeptide of SEQ ID NO:68, such as the polypeptide of SEQ ID. NO:69, for example the polypeptide of SEQ ID NO:70, such as the polypeptide of SEQ ID NO:71, for example the polypeptide of SEQ ID NO:72, such as the polypeptide of SEQ ID NO:73, for example the polypeptide of SEQ ID NO:74, such as the polypeptide of SEQ ID NO:75, for example the polypeptide of SEQ ID NO:76, such as the polypeptide of SEQ ID NO:77, for example the polypeptide of SEQ ID NO:78, such as the polypeptide of SEQ ID NO:79, for example the polypeptide of SEQ ID NO:80, such as the polypeptide of SEQ ID NO:81, for example the polypeptide of SEQ ID NO:82, such as the polypeptide of SEQ ID NO:83, for example the polypeptide of SEQ ID NO:84, such as the polypeptide of SEQ ID NO:85, for example the polypeptide of SEQ ID NO:86, such as the polypeptide of SEQ ID NO:87, for example the polypeptide of SEQ ID NO:88, such as the polypeptide of SEQ ID NO:89, for example the polypeptide of SEQ ID NO:90, such as the polypeptide of SEQ ID NO:91, for example the polypeptide of SEQ ID NO:92, such as the polypeptide of SEQ ID NO:93, for example the polypeptide of SEQ ID NO:94, such as the polypeptide of SEQ ID NO:95, for example the polypeptide of SEQ ID NO:96, such as the polypeptide of SEQ ID NO:97, for example the polypeptide of SEQ ID NO:98, such as the polypeptide of SEQ ID NO:99, for example the polypeptide of SEQ ID NO:100, such as the polypeptide of SEQ ID NO:101, for example the polypeptide of SEQ ID NO:102, such as the polypeptide of SEQ ID NO:103, for example the polypeptide of SEQ ID NO:104, such as the polypeptide of SEQ ID NO:105, for example the polypeptide of SEQ ID NO:168.

[0350] In preferred embodiments, the antibodies of the invention are furthermore capable of binding an intact Streptococcus pneumoniae cell, i.e. capable of binding a living or a dead Streptococcus cell which has maintained its structural integrity, preferably a cell that has maintained the integrity of the membrane (i.e. wherein the membrane has not been permeabilized). Binding of antibodies to intact cells can e.g. be determined by flow cytometry as described in Rioux et al. (2001) Infect. Immun. 69:5162-5165 or as described in Singh et al. (2003) Infect. Immun. 71:3937-3946.

[0351] Preferred antibodies are ones that bind with a dissociation constant or Kd of less than 5×10⁻⁸M, such as less than 10⁻⁶M, e.g. less than 5×10⁻⁷M, such as less than 10⁻⁷M, e.g. less than 5×10⁻⁸M, such as less than 10⁻⁸M, e.g. less than 5×10⁻⁹M, such as less than 10⁻⁹M, e.g. less than 5×10⁻¹⁰M, such as less than 10⁻¹⁰M, e.g. less than 5×10⁻¹¹M, such as less than 10⁻¹¹M, e.g. less than 5×10⁻¹²M, such as less than 10⁻¹²M, e.g. less than 5×10⁻¹³M, such as less than 10⁻¹³M, e.g. less than 5×10⁻¹⁴M, such as less than 10⁻¹⁴M, e.g. less than 5×10⁻¹⁵M, or less than 10⁻¹⁵M. Binding constants can be determined using methods well-known in the art, such as ELISA (e.g. as described in Orosz and Ovadi (2002) J. Immunol. Methods 270:155-162) or surface plasmon resonance analysis.

[0352] Antibodies can be used for passive immunisation of mammals, preferably human beings, more preferably immunocompromised patients. A treatment with antibodies can be done to cure or to prevent Streptococcus pneumoniae infections, including pneumococcal diseases, such as pneumonia or meningitis or pneumococcal sepsis. Preferred patient groups include children under the age of 4 years, elderly patients or immunocompromised patients.

[0353] Antibodies of the invention include the following preferred mechanistic groups:
[0354] 1. Function-inhibiting antibodies that work as an antibacterial (affect the viability of the bacterium). Such antibodies should be effective regardless of the immune status of the patient. Preferably, such antibodies are capable of reducing Streptococcus pneumoniae growth in vitro to less than 50%, such as less than 25%, for example less than 10%, such as less than 5% of a control without antibody added.
[0355] 2. Opsonising antibodies that are designed to enhance phagocytic killing. Effectiveness of such antibodies may depend on the immune status of the patient, but it is very well possible that they will enhance phagocytic killing even in compromised patients.
[0356] 3. Antibodies conjugated to a therapeutic moiety such as a toxin or bactericidal agent, e.g. ricin or radioisotopes. Techniques for conjugating a therapeutic moiety to antibodies are well known, see, e.g. Thorpe et al. (1982) Immunol. Rev. 62, 119-158. These antibodies should also be effective regardless of the immune status of the patient.
   An antibody with or without a therapeutic moiety conjugated to it can be used as a therapeutic that is administered alone or in combination with chemotherapeutics or other therapeutic agents.

[0357] In one embodiment, the antibodies of the invention are opsonising as well as function-inhibiting. In another embodiment, the antibodies of the invention are opsonising, but not function-inhibiting. The latter group of antibodies can e.g. be antibodies directed against a target polypeptide which is not essential for the viability of Streptococcus pneumoniae.

[0358] In a further main aspect, the invention relates to a method for raising antibodies to a polypeptide selected from the group consisting of SEQ ID NO:1-282, in a non-human animal comprising the steps of
[0359] a. providing
   [0360] a polypeptide comprising a sequence selected from the group consisting of SEQ ID NO:1-282, preferably selected from the group consisting of SEQ ID NO:16, SEQ ID NO:10, SEQ ID NO:13, SEQ ID NO:20, SEQ ID NO:26, SEQ ID NO:28 and SEQ ID NO:33, most preferably SEQ ID NO:16, or comprising an antigenic fragment or variant of said sequence,
   [0361] a polynucleotide comprising a sequence encoding said polypeptide,
   [0362] an expression vector comprising a sequence encoding said polypeptide,
   [0363] or
   [0364] a recombinant virus or recombinant cell comprising said polynucleotide or said expression vector,
[0365] b. introducing a composition comprising said polypeptide, polynucleotide, vector, recombinant virus or recombinant cell into said animal,
[0366] c. raising antibodies in said animal,
[0367] d. isolating and optionally purifying the antibodies.

[0368] In a preferred embodiment, antibodies capable of binding an intact Streptococcus pneumoniae cell are identified by comprising performing the above steps and the further step of selecting antibodies capable of binding an intact Streptococcus pneumoniae cell.

[0369] The above methods are preferably done in a transgenic animal which is capable of producing human antibodies. In a further preferred embodiment, the above methods are non-therapeutic.

### Monoclonal/Polyclonal Antibodies

[0370] Antibodies of the invention may be polyclonal antibodies or monoclonal antibodies or mixtures of monoclonal antibodies. In a preferred embodiment, the antibody is a monoclonal antibody or a fragment thereof. Monoclonal antibodies (Mab's) are anti-bodies wherein every antibody molecule is similar and thus recognises the same epitope. The antibody may be any kind of antibody, however, it is preferably an IgG or IgA antibody.

[0371] Preferred antibodies, more preferably monoclonal antibodies, are antibodies capable of specifically binding surface-exposed regions of the polypeptides of the invention. Accordingly, in a preferred embodiment of an antibody capable of binding SEQ ID NO:16, said antibody binds an epitope on SEQ ID NO:16 which comprises one or more amino acids of any of SEQ ID NO:289-SEQ ID NO:294. Even more preferably, said antibody binds an epitope which comprises two or more, such as three or more, e.g., four or more, such as five or more amino acids of a sequence selected from the group consisting of SEQ ID NO:289, SEQ ID NO:290, SEQ ID NO:291, SEQ ID NO:292, SEQ ID NO:293 and SEQ ID NO:294.

[0372] Monoclonal antibodies are in general produced by a hybridoma cell line. Methods of making monoclonal antibodies and antibody-synthesising hybridoma cells are well known to those skilled in the art. Antibody-producing hybridomas may for example be prepared by fusion of an antibody-producing B lymphocyte with an immortalised cell line. A monoclonal antibody can be produced by the following steps. An animal is immunised with an antigen such as a full-length polypeptide or a fragment thereof. The immunisation is typically accomplished by administering the antigen to an immunologically competent mammal in an immunologically effective amount, i.e., an amount sufficient to produce an immune response. Preferably, the mammal is a rodent such as a rabbit, rat or mouse. The mammal is then maintained on a booster schedule for a time period sufficient for the mammal to generate high affinity antibody molecules. A suspension of antibody-producing cells is removed from each immunised mammal secreting the desired antibody. After a sufficient time to generate high affinity antibodies, the animal (e.g. mouse) is sacrificed and antibody-producing lymphocytes are obtained from one or more of the lymph nodes, spleens and peripheral blood. Spleen cells are preferred, and can be mechanically separated into individual cells in a physiological medium using methods well known to one of skill in the art. The antibody-producing cells are immortalised by fusion to cells of a mouse myeloma line. Mouse lymphocytes give a high percentage of stable fusions with mouse homologous myelomas, however, rat, rabbit and frog somatic cells can also be used. Spleen cells of the desired antibody-producing animals are immortalised by fusing with myeloma cells, generally in the presence of a fusing agent such as polyethylene glycol. Any of a number of myeloma cell lines suitable as a fusion partner can be, for example, the P3-NS1/1-Ag4-1, P3-x63-Ag8.653 or Sp2/O—Ag14 myeloma lines, available from the American Type Culture Collection (ATCC), Rockville, Md.

[0373] Monoclonal antibodies can also be generated by other methods well known to those skilled in the art of recombinant DNA technology. An alternative method, referred to as the “combinatorial antibody display” method, has been developed to identify and isolate antibody fragments having a particular specificity, and can be utilised to produce monoclonal antibodies.

[0374] A polyclonal antibody is a mixture of antibody molecules recognising a specific given antigen, hence polyclonal antibodies may recognise different epitopes within e.g. a polypeptide. In general polyclonal antibodies are purified from serum of a mammal, which previously has been immunised with the antigen. Polyclonal antibodies may for example be prepared by any of the methods described in Antibodies: A Laboratory Manual, By Ed Harlow and David Lane, Cold Spring Harbor Laboratory Press, 1988. Polyclonal antibodies may be derived from any suitable mammalian species, for example from mice, rats, rabbits, donkeys, goats, and sheep.

### Specificity

[0375] The antibodies of the invention may be monospecific towards any of the polypeptides of SEQ ID NO:1-282. In another embodiment, the antibody is bispecific or multispecific having at least one portion being specific towards any of the polypeptides of SEQ ID NO:1-282.

[0376] Monospecific antibodies may be monovalent, i.e. having only one binding domain. For a monovalent antibody, the immunoglobulin constant domain amino-acid sequences preferably comprise the structural portions of an antibody molecule known in the art as CH1, CH2, CH3 and CH4. Preferred are those which are known in the art as C_{L}. Furthermore, insofar as the constant domain can be either a heavy or light chain constant domain (C_{H} or C_{L}, respectively), a variety of monovalent antibody compositions are contemplated by the present invention. For example, light chain constant domains are capable of disulphide bridging to either another light chain constant domain, or to a heavy chain constant domain. In contrast, a heavy chain constant domain can form two independent disulphide bridges, allowing for the possibility of bridging to both another heavy chain and to a light chain, or to form polymers of heavy chains. Thus, in another embodiment, the invention contemplates a composition comprising a monovalent polypeptide wherein the constant chain domain C has a cysteine residue capable of forming at least one disulphide bridge, and where the composition comprises at least two monovalent polypeptides covalently linked by said disulphide bridge.

[0377] In another embodiment of the invention the antibody is a multivalent antibody having at least two binding domains. The binding domains may have specificity for the same ligand or for different ligands.

### Multispecificity, Including Bispecificity

[0378] In a preferred embodiment the invention relates to multispecific antibodies, which have affinity for and are capable of specifically binding at least two different entities.

[0379] In one embodiment, the multispecific antibody is a bispecific antibody, which carries at least two different binding domains, at least one of which is of antibody origin. A bispecific molecule of the invention can also be a single chain bispecific molecule. Multispecific molecules can also be single-chain molecules or may comprise at least two single-chain molecules. The multispecific, including bispecific antibodies, may be produced by any suitable manner known to the person skilled in the art. A number of approaches have been developed such as the ones described in WO 94/09131; WO 94/13804; WO 94/13806 or U.S. Pat. Nos. 5,260,203; 5,455,030; 4,881,175; 5,132,405; 5,091,513; 5,476,786; 5,013,653; 5,258,498; and 5,482,858. Using a bispecific or multispecific antibody according to the invention the invention offers several advantages as compared to monospecific/monovalent antibodies. A bispecific/multispecific antibody has a first binding domain capable of specifically recognising and binding any of the Streptococcus pneumoniae polypeptides of SEQ ID NO:1-282, whereas the other binding domain(s) may be used for other purposes. In one embodiment, at least one other binding domain is used for binding to a Streptococcus pneumoniae polypeptide, such as binding to another epitope on the same Streptococcus pneumoniae polypeptide as the first binding domain. Thereby specificity for Streptococcus pneumoniae may be increased as well as increase of avidity of the antibody. In another embodiment the at least one other binding domain may be used for specifically binding a mammalian cell, such as a human cell. It is preferred that the at least other binding domain is capable of binding an immunoactive cell, such as a leukocyte, a macrophage, a lymphocyte, a basophilic cell, and/or an eosinophilic cell, in order to increase the effect of the antibody in a therapeutic method. This may be accomplished by establishing that the at least one other binding domain is capable of specifically binding a mammalian protein, such as a human protein, such as a protein selected from any of the cluster differentiation proteins (CD), in particular CD64 and/or CD89.

### Humanised Antibodies

[0380] It is not always desirable to use non-human antibodies for human therapy, since the non-human “foreign” epitopes may elicit an immune response in the individual to be treated. To eliminate or minimise the problems associated with non-human antibodies, it is desirable to engineer chimeric antibody derivatives, i.e., “humanised” antibody molecules that combine the non-human Fab variable region binding determinants with a human constant region (Fc). Such antibodies are characterised by equivalent antigen specificity and affinity of the monoclonal and polyclonal antibodies described above, and are less immunogenic when administered to humans, and therefore more likely to be tolerated by the individual to be treated.

[0381] Accordingly, in one embodiment the antibody of the invention is a humanised antibody. Humanised antibodies are in general chimeric antibodies comprising regions derived from a human antibody and regions derived from a non-human antibody, such as a rodent antibody. Humanisation (also called Reshaping or CDR-grafting) is a well-established technique for reducing the immunogenicity of monoclonal antibodies (mAbs) from xenogeneic sources (commonly rodent), increasing the homology to a human immunoglobulin, and for improving their activation of the human immune system. Thus, humanised antibodies are typically human antibodies in which some CDR residues and possibly some framework residues are substituted by residues from analogous sites in rodent antibodies.

[0382] It is important that humanised antibodies retain high affinity for the antigen and other favourable biological properties. To achieve this goal, according to a preferred method, humanised antibodies are prepared by a process of analysis of the parental sequences and various conceptual humanised products using three-dimensional models of the parental and humanised sequences. Three-dimensional immunoglobulin models are commonly available and are familiar to those skilled in the art. Computer programs are available which illustrate and display probable three-dimensional conformational structures of selected candidate immunoglobulin sequences. Inspection of these displays permits analysis of the likely role of certain residues in the functioning of the candidate immunoglobulin sequence, i.e., the analysis of residues that influence the ability of the candidate immunoglobulin to bind its antigen. In this way, FR residues can be selected and combined from the recipient and import sequences so that the desired antibody characteristic, such as increased affinity for the target antigen(s), is maximised, although it is the CDR residues that directly and most substantially influence antigen binding.

[0383] One method for humanising MAbs relates to production of chimeric antibodies in which an antigen binding site comprising the complete variable domains of one antibody is fused to constant domains derived from a second antibody, preferably a human antibody. Methods for carrying out such chimerisation procedures are for example described in EP-A-0 120 694 (Celltech Limited), EP-A-0 125 023 (Genentech Inc.), EP-A-0 171 496 (Res. Dev. Corp. Japan), EP-A-0173494 (Stanford University) and EP-A-0 194 276 (Celltech Limited).

[0384] The humanised antibody of the present invention may be made by any method capable of replacing at least a portion of a CDR of a human antibody with a CDR derived from a non-human antibody. Winter describes a method which may be used to prepare the humanised antibodies of the present invention (UK Patent Application GB 2188638A), the contents of which are incorporated by reference.

[0385] As an example, the humanised antibodies of the present invention may be produced by the following process:
[0386] (a) constructing, by conventional techniques, an expression vector containing an operon with a DNA sequence encoding an antibody heavy chain in which the CDRs and such minimal portions of the variable domain framework region that are required to retain antibody binding specificity are derived from a non-human immunoglobulin, and the remaining parts of the antibody chain are derived from a human immunoglobulin;
[0387] (b) constructing, by conventional techniques, an expression vector containing an operon with a DNA sequence encoding a complementary antibody light chain in which the CDRs and such minimal portions of the variable domain framework region that are required to retain donor antibody binding specificity are derived from a non-human immunoglobulin, and the remaining parts of the antibody chain are derived from a human immunoglobulin;
[0388] (c) transfecting the expression vectors into a host cell by conventional techniques; and
[0389] (d) culturing the transfected cell by conventional techniques to produce the humanised antibody.

[0390] The host cell may be co-transfected with the two vectors of the invention, the first vector containing an operon encoding a light chain derived polypeptide and the second vector containing an operon encoding a heavy chain derived polypeptide. The two vectors contain different selectable markers, but otherwise, apart from the antibody heavy and light chain coding sequences, are preferably identical, to ensure, as far as possible, equal expression of the heavy and light chain polypeptides. Alternatively, a single vector may be used, the vector including the sequences encoding both the light and the heavy chain polypeptides. The coding sequences for the light and heavy chains may comprise cDNA or genomic DNA or both.

[0391] The host cell used to express the altered antibody of the invention may be either a bacterial cell such as Escherichia coli, or a eukaryotic cell. In particular a mammalian cell of a well defined type for this purpose, such as a myeloma cell or a Chinese hamster ovary cell may be used.

[0392] The general methods by which the vectors of the invention may be constructed, transfection methods required to produce the host cell of the invention and culture methods required to produce the antibody of the invention from such host cells are all conventional techniques. Likewise, once produced, the humanised antibodies of the invention may be purified according to standard procedures.

### Human Antibodies

[0393] In a more preferred embodiment the invention relates to an antibody, Wherein the binding domain is carried by a human antibody, i.e. wherein the antibodies have a greater degree of human peptide sequences than do humanised antibodies.

[0394] Human mAb antibodies directed against human proteins can be generated using transgenic mice carrying the human immune system rather than the mouse system. Splenocytes from these transgenic mice immunised with the antigen of interest are used to produce hybridomas that secrete human mAbs with specific affinities for epitopes from a human protein (see, e.g., Wood et al. International Application WO 91/00906, Kucherlapati et al. PCT publication WO 91/10741; Lonberg et al. International Application WO 92/03918; Kay et al. International Application 92/03917; Lonberg, N. et al. 1994 Nature 368:856-859; Green, L. L. et al. 1994 Nature Genet. 7:13-21; Morrison, S. L. et al. 1994 Proc. Natl. Acad. Sci. USA 81:6851-6855; Bruggeman et al. 1993 Year Immunol 7:33-40; Tuaillon et al. 1993 PNAS 90:3720-3724; Bruggeman et al. 1991 Eur J Immunol 21:1323-1326). Such transgenic mice are available from Abgenix, Inc., Fremont, Calif., and Medarex, Inc., Annandale, N.J. It has been described that the homozygous deletion of the antibody heavy-chain joining region (1H) gene in chimeric and germ-line mutant mice results in complete inhibition of endogenous antibody production. Transfer of the human germ-line immunoglobulin gene array in such germ-line mutant mice will result in the production of human anti-bodies upon antigen challenge. See, e.g., Jakobovits et al., Proc. Natl. Acad. Sci. USA 90:2551 (1993); Jakobovits et al., Nature 362:255-258 (1993); Bruggemann et al., Year in Immunol. 7:33 (1993); and Duchosal et al. Nature 355:258 (1992). Human antibodies can also be derived from phage-display libraries (Hoogenboom et al., J. Mol. Biol. 227: 381 (1992); Marks et al., J. Mol. Biol. 222:581-597 (1991); Vaughan, et al., Nature Biotech 14:309 (1996)).

[0395] A preferred method for the isolation of high affinity antibodies is a subtractive procedure were human antibodies or antibody fragments against the targets, in particular against the antigens 029 (SEQ ID NO:16) and 607 (SEQ ID NO:20), in their native configuration can be rapidly obtained from a phage antibody library (see, e.g. De Kruif et al., Proc. Natl. Acad. Sci. USA 92:3938-3942 (1995); U.S. Pat. No. 6,265,150; and US patent applications 2002132228 and 2005043521). The phage antibody libraries can e.g. be constructed using antibody producing cells from patients with the disease of interest, here patients infected with Streptococcus pneumoniae. The genes coding for the antibodies produced by these cells may be cloned into a semi-synthetic phage antibody library using degenerated oligonucleotides rearranging the CDR3 Region of the cloned genes. Afterwards the library is incubated with the target antigen or target-expressing cells, here Streptococcus pneumoniae, and the phage antibodies bound to the target are isolated by using standard methods. The present invention is also directed to antibodies identified by the above procedure, in particular antibodies capable of binding a polypeptide selected from group consisting of SEQ ID NO:16, SEQ ID NO:10, SEQ ID NO:13, SEQ ID NO:20, SEQ ID NO:26, SEQ ID NO:28 and SEQ ID NO:33, preferably antibodies having a dissociation constant or Kd of less than 10⁻⁷M, e.g. less than 10⁻⁸M, such as less than 10⁻⁹M, e.g. less than 10⁻¹⁰M, such as less than 10⁻¹¹M and/or antibodies binding a surface-exposed epitope of any of these targets.

[0396] Suitable methods for producing human monoclonal antibodies have furthermore been described in WO 03/017935, WO 02/100348, US 2003 091561, and US 2003 194403.

### Binding Fragments of Antibodies

[0397] In one embodiment of the invention, the antibody is a fragment of an antibody, preferably an antigen binding fragment or a variable region. Examples of antibody fragments useful with the present invention include Fab, Fab′, F(ab′)₂ and Fv fragments. Papain digestion of antibodies produces two identical antigen binding fragments, called the Fab fragment, each with a single antigen binding site, and a residual “Fc” fragment, so-called for its ability to crystallise readily. Pepsin treatment yields an F(ab′)₂ fragment that has two antigen binding fragments which are capable of cross-linking antigen, and a residual other fragment (which is termed pFc′). Additional fragments can include diabodies, linear antibodies, single-chain antibody molecules, and multispecific antibodies formed from antibody fragments.

[0398] The antibody fragments Fab, Fv and scFv differ from whole antibodies in that the antibody fragments carry only a single antigen-binding site. Recombinant fragments with two binding sites have been made in several ways, for example, by chemical cross-linking of cysteine residues introduced at the C-terminus of the VH of an Fv (Cumber et al., 1992), or at the C-terminus of the VL of an scFv (Pack and Pluckthun, 1992), or through the hinge cysteine residues of Fab's (Carter et al., 1992).

[0399] Preferred antibody fragments retain some or essentially all of the ability of an antibody to selectively binding with its antigen. Some preferred fragments are defined as follows:
[0400] (1) Fab is the fragment that contains a monovalent antigen-binding fragment of an antibody molecule. A Fab fragment can be produced by digestion of whole anti-body with the enzyme papain to yield an intact light chain and a portion of one heavy chain.
[0401] (2) Fab′ is the fragment of an antibody molecule and can be obtained by treating whole antibody with pepsin, followed by reduction, to yield an intact light chain and a portion of the heavy chain. Two Fab′ fragments are obtained per antibody molecule. Fab′ fragments differ from Fab fragments by the addition of a few residues at the carboxyl terminus of the heavy chain CH1 domain including one or more cysteines from the antibody hinge region.
[0402] (3) (Fab′)₂ is the fragment of an antibody that can be obtained by treating whole anti-body with the enzyme pepsin without subsequent reduction. F(ab′)₂ is a dimer of two Fab′ fragments held together by two disulfide bonds.
[0403] (4) Fv is the minimum antibody fragment that contains a complete antigen recognition and binding site. This region consists of a dimer of one heavy and one light chain variable domain in a tight, non-covalent association (V_{H}-V_{L} dimer). It is in this configuration that the three CDRs of each variable domain interact to define an antigen binding site on the surface of the V_{H}-V_{L} dimer. Collectively, the six CDRs confer antigen binding specificity to the antibody. However, even a single variable domain (or half of an Fv comprising only three CDRs specific for an antigen) has the ability to recognise and bind antigen, although at a lower affinity than the entire binding site.

[0404] In one embodiment of the present invention the antibody is a single-chain antibody, defined as a genetically engineered molecule containing the variable region of the light chain, the variable region of the heavy chain, linked by a suitable polypeptide linker as a genetically fused single chain molecule. Such single-chain antibodies are also referred to as “single-chain Fv” or “sFv” antibody fragments. Generally, the Fv polypeptide further comprises a polypeptide linker between the V_{H} and V_{L} domains that enables the sFv to form the desired structure for antigen binding.

[0405] The antibody fragments according to the invention may be produced in any suitable manner known to the person skilled in the art. Several microbial expression systems have already been developed for producing active antibody fragments, e.g. the production of Fab in various hosts, such as E. coli or yeast has been described, The fragments can be produced as Fab's or as Fv's, but additionally it has been shown that a V_{H} and a V_{L} can be genetically linked in either order by a flexible polypeptide linker, which combination is known as an scFv.

### Compositions for Use in the Invention

[0406] In a preferred embodiment of the composition for use as a medicament, said composition comprises, in addition to the active component, a pharmaceutically-acceptable carrier.

[0407] As used herein, the term “pharmaceutically acceptable” used in connection with compositions or carriers represents that the materials are capable of being administered to or upon a human or animal without the production of undesirable physiological effects such as nausea, dizziness, gastric upset and the like.

[0408] The preparation of a composition that contains active ingredients dissolved or dispersed therein is well understood in the art. Often such compositions are prepared as sterile injectables either as liquid solutions or suspensions, aqueous or non-aqueous, however, solid forms suitable for solution, or suspension, in liquid prior to use can also be prepared. The preparation can also be emulsified. The active ingredient can be mixed with carriers which are pharmaceutically acceptable and compatible with the active ingredient and in amounts suitable for use in the methods described herein. Suitable carriers are, for example, water, saline, dextrose, glycerol, ethanol or the like and combinations thereof. In addition, if desired, the composition can contain minor amounts of auxiliary substances such as wetting or emulsifying agents, pH-buffering agents and the like which enhance the effectiveness of the active ingredient.

[0409] The compositions of the present invention can include pharmaceutically-acceptable salts of the active components therein. Pharmaceutically acceptable salts include the acid addition salts (formed with the free amino groups of the polypeptide) that are formed with inorganic acids such as, for example, hydrochloric or phosphoric acids, or such organic acids as acetic, tartaric, mandelic and the like. Salts formed with the free carboxyl groups can also be derived from inorganic bases such as, for example, sodium, potassium, ammonium, calcium or ferric hydroxides, and such organic bases as isopropylamine, trimethylamine, 2-ethylamino ethanol, histidine, procaine and the like.

[0410] Pharmaceutically-acceptable carriers are well known in the art. Exemplary of liquid carriers are sterile aqueous solutions that contain no materials in addition to the active ingredients and water, or contain a buffer such as sodium phosphate at physiological pH value, physiological saline or both, such as phosphate-buffered saline. Still further, aqueous carriers can contain more than one buffer salt, as well as salts such as sodium and potassium chlorides, dextrose, propylene glycol, polyethylene glycol and other solutes. Liquid compositions can also contain liquid phases in addition to and to the exclusion of water. Exemplary of such additional liquid phases are glycerin, vegetable oils such as cottonseed oil, organic esters such as ethyl oleate, and water-oil emulsions.

[0411] The composition may also be a kit-in-part further including an antibiotic agent, such as antibiotics selected from vancomycin, β-lactams, cephalosporins, penicillins, aminoglycosides, macrolide antibiotics (erythromycin, clarithromycin, or azithromycin) and fluoroquinolone antibiotics (ciprofloxacin, levofloxacin, gatifloxacin, or moxifloxacin) and/or including an immunostimulating agent, such as cytokines, interferons, growth factors, for example GCSF or GM-CSF. The kit-in-part may be used for simultaneous, sequential or separate administration.

[0412] The Invention furthermore relates to pharmaceutical compositions useful for practising the methods described herein. Thus, the invention relates to a pharmaceutical composition comprising a pharmaceutically-acceptable carrier and
[0413] an isolated polypeptide which comprises any of the sequences of SEQ ID NO:1-282, preferably selected from the group consisting of SEQ ID NO:16, SEQ ID NO:10, SEQ ID NO:13, SEQ ID NO:20, and SEQ ID NO:28, most preferably SEQ ID NO:16, or comprises a fragment or variant of any of said sequences,
[0414] an isolated polynucleotide comprising a sequence encoding said polypeptide,
[0415] an expression vector comprising a sequence encoding said polypeptide,
[0416] or
[0417] a recombinant virus or recombinant cell comprising said polynucleotide or said expression vector.

[0418] Furthermore, the invention relates to a pharmaceutical composition comprising an antibody of the invention, preferably an antibody capable of binding a polypeptide selected from the group consisting of SEQ ID NO:16, SEQ ID NO:10, SEQ ID NO:13, SEQ ID NO:20, SEQ ID NO:26, SEQ ID NO:28 and SEQ ID NO:33, most preferably SEQ ID NO:16, as defined herein and a pharmaceutically-acceptable carrier.

### Polypeptides of the Invention

### Fragments of the Invention

[0419] In a further aspect, the invention relates to a fragment, preferably an antigenic fragment, of a polypeptide set forth in any of SEQ ID NO:1-282, preferably SEQ ID NO:16. Antigenicity can be predicted by various methods known in the art. The length of such fragments may vary from 2 consecutive amino-acid residues of a polypeptide to the full-length polypeptide minus one amino-acid residue. Preferably, fragments are less than 100 consecutive amino acids, such as less than 70 or 50 consecutive amino acids, e.g. less than consecutive 40 amino acids, such as less than 30 consecutive amino acids, e.g. less than 25 consecutive amino acids, such as less than consecutive 20 amino acids in length. Thus, for example fragments can be 2, 3, 4, 5, 6, 7, 8, 9, 10, 11, 12, 13, 14, 15, 16, 17, 18, 19 or 20 consecutive amino acids in length. In further preferred embodiments, a fragment comprises 6 or more, such as 7 or more, e.g. 8 or more, such as 9 or more, e.g. 10 or more consecutive amino acids of the corresponding full-length sequence. Preferred ranges include fragments of between 5 and 50 consecutive amino acids in length, such as between 5 and 25 consecutive amino acids in length, e.g. between 5 and 20 consecutive amino acids in length. Expressed in another way, a fragment consists of a part of an amino-acid sequence which is less than 100% in length as compared to the full-length polypeptide. Preferably, the length of the fragment is less than 99%, such as less than 75%, e.g. less than 50%, such as less than 25%, e.g. less than 20%, such as less than 15%, e.g. less than 10% of the length of the full-length polypeptide. In further preferred embodiments, the fragment consists of a part of an amino-acid sequence which is less than 100%, but more than 1% in length as compared to the full-length polypeptide, such as less than 100% but more than 5%, e.g. less than 100% but more than 10%, such as less than 100% but more than 20%, e.g. less than 100% but more than 25%, such as less than 100% but more than 50% of the length of the full-length polypeptide.

[0420] Preferably, fragments of the invention are surface-exposed in an intact Streptococcus pneumoniae cell or other cell when expressed recombinantly therein. Surface-exposure can be e.g. be determined using a monoclonal antibody specific for said fragment, e.g. as described in Singh et al. (2003) Infect. Immun. 71:3973-3946. Also preferred are fragments which are capable of inducing antibodies that can specifically bind an intact Streptococcus pneumoniae cell. This can be determined by generating monoclonal antibodies using said fragment and subsequent characterisation of the binding of individual antibodies to Intact cells, e.g. as described in Singh et al. (2003) Infect. Immun. 71:3973-3946. Preferred fragments of SEQ ID NO:16 include fragments comprising or consisting of one or more of the sequences of SEQ ID NO:289-SEQ ID NO:294, more preferred fragments include fragments comprising or consisting of SEQ ID NO:289 and/or SEQ ID NO:290, fragments comprising or consisting of SEQ ID NO: 291 and/or SEQ ID NO: 292, and fragments comprising or consisting of SEQ ID NO:293 and/or SEQ ID NO:294.

[0421] The full-length polypeptides of SEQ ID NO:1-282 as well as the fragments of the invention can be produced recombinantly by conventional techniques known in the art. Suitable host cells can be mammalian cells, e.g. CHO, COS or HEK293 cells. Alternatively, insect cells, bacterial cells or fungal cells can be used. Methods for heterologous expression of polynucleotide sequences in the cell types listed above and subsequent purification of the produced polypeptides, e.g. using a tag sequence such as a histidine tag, which may be removed after purification, are well-known to those skilled in the art. Alternatively, fragments of the invention can be produced synthetically.

### Variants of the Invention

[0422] In a further main aspect, the invention relates to the use of variants of any of the polypeptides set forth in SEQ ID NO:1-282, preferably SEQ ID NO:16, or variants of fragments of any of the polypeptides set forth in SEQ ID NO:1-282, preferably SEQ ID NO:16, in a composition for use as a medicament. When used herein, phrases such as ‘a polypeptide having at least 95% sequence identity to SEQ ID NO:X’ are used interchangeably with, and are intended to be directed to the same subject-matter as, phrases such as ‘the polypeptide of SEQ ID NO:X and variants thereof, wherein the variant has at least 95% sequence identity to said sequence.’

[0423] Variants preferably have at least 75% sequence identity, for example at least 80% sequence identity, such as at least 85% sequence identity, for example at least 90% sequence identity, such as at least 91% sequence identity, such as at least 92% sequence identity, for example at least 93% sequence identity, such as at least 94% sequence identity, for example at least 95% sequence identity, such as at least 96% sequence identity, for example at least 97% sequence identity, such as at least 98% sequence Identity, for example 99% sequence identity with the given polypeptide or fragment. Sequence identity is determined with any of the algorithms GAP, BESTFIT, or FASTA in the Wisconsin Genetics Software Package Release 7.0, using default gap weights.

[0424] Preferred variants of a given polypeptide or fragment are variants in which all amino-acid substitutions between the variant and the given reference polypeptide or fragment are conservative substitutions. Conservative amino-acid substitutions refer to the interchangeability of residues having similar side chains. For example, a group of amino acids having aliphatic side chains is glycine, alanine, valine, leucine, and isoleucine; a group of amino acids having aliphatic-hydroxyl side chains is serine and threonine, a group of amino acids having amide-containing side chains is asparagine and glutamine; a group of amino acids having aromatic side chains is phenylalanine, tyrosine, and tryptophan; a group of amino acids having basic side chains is lysine, arginine, and histidine; and a group of amino acids having sulfur-containing side chains is cysteine and methionine. Preferred conservative amino-acids substitution groups are: valine-leucine-isoleucine, phenylalanine-tyrosine, lysine-arginine, alanine-valine, and asparagine-glutamine.

[0425] Variants of a polypeptide or of a fragment thereof also include forms of the polypeptide or fragment wherein one or more amino acids have been deleted or inserted. Preferably, less than 5, such as less than 4, e.g. less than 3, such as less than 2, e.g. only one amino acid has been inserted or deleted. ‘Variants’ of a polypeptide or of a fragment thereof also include forms of these polypeptides or fragments modified by post-translational modifications of the amino-acid sequence.

### Recombinant Cells of the Invention

[0426] In a further main aspect, the invention relates to the use of a recombinant cell transformed or transfected with a polynucleotide comprising a sequence encoding a polypeptide, said polypeptide comprising a sequence selected from the group consisting of SEQ ID NO:1-282, preferably SEQ ID NO:16, or comprising an antigenic fragment or variant of said sequence. Preferably, said recombinant cell is an Escherichia coli or Salmonella cell, more preferably an attenuated or reduced-virulence Escherichia or Salmonella cell.

[0427] Suitable bacterial strains for use herein have been described in e.g. Makino et al. (2001) Microb. Pathog. 31:1-8; Gentschev et al. (2002) Int. J. Med. Microbiol. 291:577-582; Turner et al. (2001) Infect. Immun. 69:4969-4979; WO99/49026; and WO03/022307 and references therein. Examples of suitable Salmonella strains are CvD908-T7pol (Santiago-Machuca et al. (2002) Plasmid 47:108-119), ATCC 39183, ATCC 53647 and ATCC 53648. Examples of suitable E. coli strains are YT106 and E1392/75-2A.

### METHODS AND USES OF THE INVENTION

[0428] The compositions and other products defined above can be used to treat or prevent Streptococcus pneumoniae infections, and/or disease resulting from such infections, In animals or human beings in need thereof.

[0429] Treatment and prevention herein include all types of therapeutic treatment and preventive treatment and other treatments to combat Streptococcus pneumoniae, including but not limited to vaccination, prophylaxis, active immunisation, passive immunisation, administration of antibodies, curative treatment, ameliorating treatment. In particular, passive immunisation using antibodies of the invention is a suitable treatment for immunocompromised individuals.

### Diagnostic Methods of the Invention

[0430] The combination of being surface-exposed and being present in relatively high copy numbers in cells also makes the polypeptides identified by the inventors highly suitable as targets for detection of Streptococcus pneumoniae, allowing detection of this organism with high sensitivity.

[0431] Accordingly, in a further main aspect, the invention relates to a method for detecting Streptococcus pneumoniae or parts thereof in a sample comprising the steps of
[0432] a. contacting said sample with an indicator moiety capable of specifically binding a polypeptide selected from the group consisting of SEQ ID NO:1-282, preferably selected from the group consisting of SEQ ID NO:16, SEQ ID NO:10, SEQ ID NO:13, SEQ ID NO:20, SEQ ID NO:26, SEQ ID NO:28 and SEQ ID NO:33, most preferably SEQ ID NO:16, and
[0433] b. determining whether a signal has been generated by the indicator moiety, thereby detecting whether said sample contains Streptococcus pneumoniae or parts thereof.
   Preferably, said indicator moiety is capable of binding, preferably specifically binding, intact Streptococcus pneumoniae cells.

[0434] In preferred embodiments of the above diagnostic methods, a washing step is performed between the contacting step and the determination step, in order to improve the specificity of detection.

[0435] The sample can e.g. be feces, urine, a tissue, tissue extract, fluid sample or body fluid sample, such as blood, plasma, serum, sputum, or a sample taken from nose or lung. Another example of a sample is a food sample, such as a meat sample.

[0436] In another aspect, the invention relates to a method for detecting Streptococcus pneumoniae or parts thereof in a sample comprising the step of analysing a sample by mass spectrometry to evaluate the presence and/or quantity of one or more of the polypeptides of SEQ ID NO:1-282, in particular SEQ ID NO:16 and/or SEQ ID NO:20. In one embodiment, the sample, e.g. a blood sample, is pre-treated to enrich for the polypeptide(s) to be detected. Such a pre-treatment may include a size-fractionation of proteins present in the sample.

[0437] The above methods can e.g. be used to diagnose Streptococcus pneumoniae infections in an individual. In preferred embodiments of the above methods, said indicator moiety does not pass through the membrane of a Streptococcus pneumoniae cell. A preferred type of said indicator moiety consists of or comprises an antibody, such as an antibody of the invention as defined herein.

[0438] Those skilled in the art will understand that there are numerous well known clinical diagnostic chemistry procedures in which an indicator moiety can be used to form an binding reaction product whose amount relates to the amount of the ligand, herein Streptococcus pneumoniae or parts thereof, in a sample. Thus, while exemplary assay methods are described herein, the invention is not so limited.

[0439] The present invention also relates to a diagnostic system, preferably in kit form, for assaying for the presence, and preferably also the amount, of Streptococcus pneumoniae in a biological sample. Methods for the preparation of diagnostic kits have e.g. been described in U.S. Pat. No. 5,470,958 and references therein.

[0440] The diagnostic system includes, in an amount sufficient to perform at least one assay, an indicator moiety according to the present invention, preferably as a separately packaged reagent, and more preferably also instructions for use. Packaged refers to the use of a solid matrix or material such as glass, plastic (e.g., polyethylene, polypropylene or polycarbonate), paper, foil and the like capable of holding within fixed limits an indicator moiety of the present invention. Thus, for example, a package can be a glass vial used to contain milligram quantities of a contemplated labelled indicator moiety preparation, or it can be a microtiter plate well to which microgram quantities of a contemplated indicator moiety has been operatively affixed, i.e., linked so as to be capable of binding a ligand.

[0441] “Instructions for use” typically include a tangible expression describing the reagent concentration or at least one assay method parameter such as the relative amounts of reagent and sample to be admixed, maintenance time periods for reagent-sample admixtures, temperature, buffer conditions and the like.

[0442] In most embodiments, the diagnostic method and system of the present invention include as a part of the Indicator moiety, a label or indicating means capable of signalling the formation of a binding reaction complex containing an indicator moiety complexed with the preselected ligand (i.e. a polypeptide comprising any of the sequences of SEQ ID NO:1-282 and/or a fragment thereof). Such labels are themselves well-known in clinical diagnostic chemistry.

[0443] The labelling means can be a fluorescent labelling agent that chemically binds to antibodies or antigens without denaturing them to form a fluorochrome (dye) that is a useful immunofluorescent tracer. Suitable fluorescent labelling agents are fluorochromes such as fluorescein isocyanate (FIC), fluorescein isothiocyante (FITC), 5-dimethylamine-1-naphthalenesulfonyl chloride (DANSC), tetramethylrhodamine isothiocyanate (TRITC), lissamine, rhodamine 8200 sulphonyl chloride (RB 200 SC). Other examples of suitable fluorescent materials include umbelliferone, dichlorotriazinylamine fluorescein, dansyl chloride or phycoerythrin and the like. A description of immunofluorescence analysis techniques is found in DeLuca, “Immunofluorescence Analysis”, in Antibody As a Tool, Marchalonis, et al., eds., John Wiley & Sons, Ltd., pp. 189-231 (1982).

[0444] Radioactive elements can be useful as labelling agents. An exemplary radiolabeling agent is a radioactive element that produces gamma ray emissions. Elements which themselves emit gamma rays, such as ¹²⁴I, ¹²⁵I, ¹²⁸I, ¹³²I and ⁵¹Cr represent one class of gamma ray emission-producing radioactive element indicating groups. Particularly preferred is ¹²⁵I. Another group of useful labelling means are those elements such as ¹¹C, ¹⁸F, ¹⁵O and ¹³N which themselves emit positrons, or beta emitters, such as ¹¹¹indium of ³H. Other suitable radioactive materials include ¹³¹I and ³⁵S.

[0445] Detection using antibodies can, in other embodiments, be facilitated by coupling the antibody to another detectable substance, such as an enzyme, a prosthetic group, a luminescent materials, or a bioluminescent material. Examples of suitable enzymes include horseradish peroxidase, alkaline phosphatase, beta-galactosidase, or acetylcholinesterase; examples of suitable prosthetic group complexes include Streptavidin/biotin and avidin/biotin; an example of a luminescent material includes luminol; examples of bioluminescent materials include luciferase, luciferin, and aequorin.

[0446] In preferred embodiments, the indicating group is an enzyme, such as horseradish peroxidase (HRP) or glucose oxidase. In such cases where the principal indicating group is an enzyme such as HRP or glucose oxidase, additional reagents are required to visualise the fact that a indicator-moiety/ligand complex (immunoreactant) has formed. Such additional reagents for HRP include hydrogen peroxide and an oxidation dye precursor such as diaminobenzidine. An additional reagent useful with glucose oxidase is 2,2′-amino-di-(3-ethyl-benzthiazoline-G-sulfonic acid).

[0447] The linking of labels, i.e. labelling of polypeptides such as antibodies, is well known in the art. For instance, proteins can be labelled by metabolic incorporation of radioisotope-containing amino acids provided as a component in the culture medium. See, for example, Galfre et al., Meth. Enzymol., 73:3-46 (1981). The techniques of protein conjugation or coupling through activated functional groups are particularly applicable. See, for example, Aurameas, et al., Scand. J. Immunol., Vol. 8 Suppl. 7:7-23 (1978), Rodwell et al. (1984) Biotech. 3:889-894, and U.S. Pat. No. 4,493,795.

[0448] Various diagnostic assays employing the above indicator moieties can be set up to test samples for Streptococcus pneumoniae. Exemplary assays are described in detail in Antibodies: A Laboratory Manual, Harlow and Lane (eds.), Cold Spring Harbor Laboratory Press, 1988. Representative examples of such assays include: countercurrent immuno-electrophoresis (CIEP), radioimmunoassays, radioimmuno-precipitations, enzyme-linked immuno-sorbent assays (ELISA), Western blot assays, dot blot assays, inhibition or competition assays, and sandwich assays, immunostick (dipstick) assays, simultaneous immunoassays, immunochromatographic assays, immunofiltration assays, latex bead agglutination assays, immunofluorescent assays, biosensor assays, and low-light detection assays (see e.g. also U.S. Pat. Nos. 4,376,110 and 4,486,530). An example of a suitable assay is an assay wherein a sample, e.g. a serum sample, is separated by electrophoresis and the polypeptide of interest, e.g. SEQ ID NO:16, is subsequently detected by Western blotting.

[0449] In one embodiment, the diagnostic kits of the present invention can be used in an “ELISA” format to detect the quantity of a preselected ligand in a fluid sample. “ELISA” refers to an enzyme-linked immunosorbent assay that employs an antibody or antigen bound to a solid phase and an enzyme-antigen or enzyme-antibody conjugate to detect and quantify the amount of an antigen present in a sample and is readily applicable to the present methods. Thus, in some embodiments, an indicator moiety of the present invention can be affixed to a solid matrix to form a solid support that comprises a package in the subject diagnostic systems. A reagent is typically affixed to a solid matrix by adsorption from an aqueous medium although other modes of affixation applicable to polypeptides, such as antibodies, can be used that are well known to those skilled in the art. Useful solid matrices are also well known in the art. Such materials are water insoluble and include the cross-linked dextran available under the trademark SEPHADEX from Pharmacia Fine Chemicals (Piscataway, N.J.); agarose; beads of polystyrene beads about 1 micron to about 5 millimetres in diameter available from Abbott Laboratories of North Chicago, Ill.; polyvinyl chloride, polystyrene, cross-linked polyacrylamide, nitrocellulose- or nylon-based webs such as sheets, strips or paddles; or tubes, plates or the wells of a microtiter plate such as those made from polystyrene or polyvinylchloride.

[0450] A further diagnostic method may utilise the multivalency of an antibody composition of one embodiment of this invention to cross-link ligands, thereby forming an aggregation of multiple ligands and polypeptides, producing a precipitable aggregate. This embodiment is comparable to the well known methods of immune precipitation. This embodiment comprises the steps of admixing a sample with a composition comprising an antibody of this invention to form a binding admixture under binding conditions, followed by a separation step to isolate the formed binding complexes. Typically, isolation is accomplished by centrifugation or filtration to remove the aggregate from the admixture. The presence of binding complexes indicates the presence of the preselected ligand to be detected.

### Binding Partners and Inhibitors of Polypeptides of the Invention

[0451] The surface-localisation of the polypeptides to which this invention relates makes them highly suitable as targets for binding partners, such as Inhibitors. Surface-located polypeptides of a pathogenic microorganism often interact with the host organism. Thus, any type of binding partner of a surface-located polypeptide may interfere with host-pathogen interaction. Binding partners thus often antagonise the pathogenicity (virulence) of a microorganism. A binding partner may also be an inhibitor of the polypeptide it binds.

[0452] Thus, in a further main aspect, the invention relates to methods for the identification of binding partners of the surface-located polypeptides set forth in SEQ ID NO:1-282. Such methods may be biochemical or cell-based.

### Biochemical Methods

[0453] In a main aspect, the invention relates to a method for identifying a binding partner of a polypeptide selected from the group consisting of SEQ ID NO:1-282, or a fragment thereof, comprising the steps of
[0454] a. providing a polypeptide selected from the group consisting of SEQ ID NO:1-282 preferably selected from the group consisting of SEQ ID NO:16, SEQ ID NO:10, SEQ ID NO:13, SEQ ID NO:20, SEQ ID NO:26, SEQ ID NO:28 and SEQ ID NO:33, most preferably SEQ ID NO:16,
   [0455] or
   [0456] a fragment thereof,
[0457] b. contacting said polypeptide or fragment with a putative binding partner, and
[0458] c. determining whether said putative binding partner is capable of binding to said polypeptide or fragment.
   In a preferred embodiment, said putative binding partner is a host-derived molecule.

[0459] In further preferred embodiments of the method, the polypeptide or fragment thereof is provided immobilised on a solid support, such as e.g. a column or microtiter plate, and, after the contacting step, it is determined whether or not the putative binding partner has bound to the solid support. Immobilisation of the polypeptide or fragment thereof may be through direct binding to the solid support, or through indirect binding e.g. using a specific antibody. In preferred embodiments, a washing step is performed between the contacting step and the determination step, in order to improve the specificity of detection. In further preferred embodiments, the putative binding partner is complexed with a detectable label. The putative partner may be labelled before the contacting takes place. Alternatively, labelling may also be performed after the contacting step. Furthermore, in some embodiments of this method, immobilisation may be performed after the polypeptide or fragment thereof has been bound to the binding partner. In preferred embodiments, the method is a screening method wherein the method is repeated for a plurality of putative binding partners. Suitable methods to determine binding are well-known in the art, and several of them have been referred to elsewhere herein.

[0460] In another aspect, a host-derived binding partner of a polypeptide selected from the group of SEQ ID NO:1-282, preferably SEQ ID NO:16 may be identified as follows: purified host membranes are electrophoretically separated, blotted over to a membrane and incubated with the polypeptide of interest or fragment thereof. Binding can then be detected using antibodies specific for the polypeptide of interest or fragment thereof. The host binding partner to which the polypeptide or fragment thereof has bound can subsequently be identified by elution from the blot and subsequent analysis by mass spectrometry, or by any other technique known in the art.

[0461] If the binding partner of a surface-located polypeptide of a pathogenic organism is a host-derived molecule, then such an interaction between the surface-located polypeptide and the host may be important for the virulence of the bacterium. Compounds that interfere with the interaction of the surface-located polypeptide and the host-derived binding partner may thus be suitable for prevention or treatment of Streptococcus pneumoniae infections. Accordingly, another method of the invention relates to a method of identifying an inhibitor of the interaction of any of the surface-located Streptococcus pneumoniae polypeptides of SEQ ID NO:1-282 with a host-derived binding partner comprising the steps of:
[0462] a. providing any of the polypeptides of SEQ ID NO:1-282, preferably selected from the group consisting of SEQ ID NO:16, SEQ ID NO:10, SEQ ID NO:13, SEQ ID NO:20, SEQ ID NO:26, SEQ ID NO:28 and SEQ ID NO:33, most preferably SEQ ID NO:16
   [0463] or
   [0464] a fragment thereof,
[0465] b. providing a host-derived binding partner of said polypeptide (identified as described above or by any other method),
[0466] c. contacting said polypeptide with said host-derived binding partner in the absence of a putative inhibitor of said interaction,
[0467] d. contacting said polypeptide with said host-derived binding partner in the presence of said putative inhibitor,
   [0468] and
[0469] e. determining whether the strength of the binding of said polypeptide to said host-derived binding partner resulting from step d. is reduced as compared to that resulting from step c.
   In some embodiments, step c. and d. may be performed in two different sample compartments. In other embodiments, step d. may be performed by adding the putative inhibitor to the mixture of step c. In preferred embodiments, the method is repeated for a plurality of putative inhibitors.

[0470] Of particular interest are binding partners that inhibit an activity of a surface-located polypeptide. Such activity may be enzymatic activity, transport activity, or any type of other biochemical or cellular activity, preferably enzymatic activity.

[0471] Preferred host-derived binding partners are host polypeptides and host lipids. Binding may e.g. be determined as described by Szymanski and Armstrong (1996) Infect. Immun. 64:3467-3474.

[0472] In preferred embodiments of the above described biochemical methods, the binding between the binding partner and the surface-located polypeptide or fragment thereof has a dissociation constant or Kd of less than 5×10⁻⁶M, such as less than 10⁻⁶M, e.g. less than 5×10⁻⁷M, such as less than 10⁻⁷M, e.g. less than 5×10⁻⁸M, such as less than 10⁻⁸M, e.g. less than 5×10⁻⁹M, such as less than 10⁻⁹M, e.g. less than 5×10⁻¹⁰M, such as less than 10⁻¹⁰ M, e.g. less than 5×10⁻¹¹M, such as less than 10⁻¹¹M, e.g. less than 5×10⁻¹²M, such as less than 10⁻¹²M. Dissociation constants can e.g. be determined by surface plasmon resonance analysis.

### Cell-Based Methods

[0473] Reducing the level of a surface-located polypeptide, by deletion or disruption of the structural gene for it or by down-regulating gene expression (see below), may affect a bacterial cell. The cell may become more sensitive to cytotoxic compounds. Especially for surface-located polypeptides, a reduction of their level may affect the function of the cell's exterior parts, such as the membrane or cell wall, in preventing compounds of entering the cell. Thus, reduction of the level of an surface-located polypeptide can make a cell more ‘permeable’ for various compounds.

[0474] Thus, an aspect of the present invention relates to a method for identifying a compound with antibacterial activity against Streptococcus pneumoniae comprising the steps of
[0475] a. providing a sensitised cell which has a reduced level of any of the polypeptides of SEQ ID NO:1-282, preferably selected from the group consisting of SEQ ID NO:16, SEQ ID NO:10, SEQ ID NO:13, SEQ ID NO:20, SEQ ID NO:26, SEQ ID NO:28 and SEQ ID NO:33, most preferably SEQ ID NO:16
   [0476] and
[0477] b. determining the sensitivity of said cell to a putative antibacterial compound, for instance by a growth assay.

[0478] Preferably, the method is a screening method wherein the procedure is repeated for a plurality of putative antibacterial compounds. Preferred putative antibacterial compounds are ones that do not pass through the membrane of a wild-type Streptococcus pneumoniae cell.

[0479] The rationale behind this approach is that a cell with a lower level of the surface-located polypeptide will exhibit increased sensitivity to cytotoxic compounds, allowing identification of antibacterial compounds with low potency that are missed when using wild-type cells for the assay. Compounds identified by this method will be often need to be modified in order to improve potency. This can be done by chemical modification.

[0480] Inhibition of the activity of a surface-located polypeptide may affect the viability (i.e. survival, growth and/or proliferation) of the bacterium. Of particular interest is inhibition of surface-located polypeptides that are essential for viability of Streptococcus pneumoniae. Methods for testing essentiality of a Streptococcus pneumoniae gene have been described in the prior art, e.g. in Chan et al. (2002) J. Bacteriol 185:2051-2058 and Thanassi et al. (2002) Nucleic Acid Res. 30:3152-31-62. Inhibitors of essential surface-located polypeptides may not need to enter the bacterial cell to be able to affect its viability. Thus, generally fewer requirements are posed on the structure of an inhibitor of an essential surface-located target polypeptide than on an inhibitor of an intracellular target, to be effective as an antibacterial agent.

[0481] Accordingly, the invention relates to a method for identifying an inhibitor of a polypeptide selected from the group consisting of SEQ ID NO:1-282, comprising the steps of
[0482] a. providing two cells which differ in the level of any of the polypeptides of SEQ ID NO:1-282, preferably selected from the group consisting of SEQ ID NO:16, SEQ ID NO:10, SEQ ID NO:13, SEQ ID NO:20, SEQ ID NO:26, SEQ ID NO:28 and SEQ ID NO:33, most preferably SEQ ID NO:16
[0483] b. determining the sensitivity of said cells to a putative inhibitor, for instance by a growth assay, and
[0484] c. determining whether said two cells are differently affected by the presence of said putative inhibitor.
   Preferably, the method is repeated for a plurality of putative inhibitors. Preferred inhibitors are ones that do not pass through the membrane of a Streptococcus pneumoniae cell.

[0485] The rationale behind this approach is that the viability of a cell with a lower activity of the essential polypeptide will be more affected by an inhibitor of the polypeptide than the viability of the cell with a higher level. If the two cells are differently affected, this is an indication that the inhibitor acts on the target or at least in the same biochemical pathway.

[0486] In some embodiments of the method, the two cells with different activity of the polypeptide of interest are a wild-type cell (or other cell with wild-type activity of the gene of interest) and a sensitised cell with a reduced activity of the polypeptide of interest. In some embodiments, the different or reduced level in the sensitised cell can be a different or reduced expression level of the gene of interest (resulting in a different or reduced copy number of the polypeptide). This can be accomplished by putting the gene under control of a regulatable promoter or by regulatable expression of an antisense RNA which inhibits translation of an mRNA encoding the essential polypeptide. In other embodiments, the different or reduced activity can be a different or reduced activity of the polypeptide of interest, e.g. due to a mutation, such as a temperature-sensitive mutation.

[0487] Suitable ways of generating sensitised bacterial cells and of using these in screening for inhibitors have been described in WO 02/077183. Sensitised cells may be obtained by growing a conditional-expression Streptococcus pneumoniae mutant strain in the presence of a concentration of inducer or repressor or other conditions which provide a level of a gene product required for bacterial viability such that the presence or absence of its function becomes a rate-determining step for viability. The sub-lethal expression of the target gene may be such that growth inhibition is at least about 10%, such as at least about 25%, e.g. at least about 50%, such as at least about 75%, e.g. at least 90%, such as at least 95%.

[0488] In another embodiment of the cell-based assays of the present invention, sensitised cells are obtained by reduction of the level activity of a polypeptide required for bacterial viability using a mutation, such as a temperature-sensitive mutation, in the polypeptide. Growing such cells at an intermediate temperature between the permissive and restrictive temperatures produces cells with reduced activity of the gene product. It will be appreciated that the above method may be performed with any mutation which reduces but does not eliminate the activity or level of the gene product which is required for bacterial viability. This approach may also be combined with the conditional-expression approach. In this combined approach, cells are created in which there is a temperature-sensitive mutation in the gene of interest and in which this gene is also conditionally-expressed.

[0489] When screening for inhibitors of an essential polypeptide, growth inhibition can be measured by directly comparing the amount of growth, measured by the optical density of the culture relative to uninoculated growth medium, in an experimental sample with that of a control sample. Alternative methods for assaying cell proliferation include measuring green fluorescent protein (GFP) reporter, construct emissions, various enzymatic activity assays, and other methods well known in the art. Other parameters used to measure viability include e.g. colony forming units. The above method may be performed in solid phase, liquid phase, a combination of the two preceding media, or in vivo. Multiple compounds may be transferred to agar plates and simultaneously tested using automated and semi-automated equipment. Cell-based assays of the present invention are capable of detecting compounds exhibiting low or moderate potency against the target molecule of interest because such compounds are substantially more potent on sensitised cells than on non-sensitised cells. The effect may be such that a test compound may be two to several times more potent, e.g. at least 10 times more potent, such as at least 20 times more potent, e.g. at least 50 times more potent, such as at least 100 times more potent, e.g. at least 1000 times more potent, or even more than 1000 times more potent when tested on the sensitised cells as compared to non-sensitised cells.

[0490] A mutant Streptococcus pneumoniae strain that overexpresses a surface-located polypeptide can also be used to identify a compound that inhibits such a polypeptide. If the compound is cytotoxic, overexpression of the target polypeptide can make cells more resistant. Thus, the invention also relates to a method for finding an inhibitor of any of the surface-located Streptococcus pneumoniae polypeptides of SEQ ID NO:1-282 comprising the steps of
[0491] a. providing two cells which differ in the activity of any of the surface-located Streptococcus pneumoniae polypeptides of SEQ ID NO:1-282, preferably selected from the group consisting of SEQ ID NO:16, SEQ ID NO:10, SEQ ID NO:13, SEQ ID NO:20, SEQ ID NO:26, SEQ ID NO:28 and SEQ ID NO:33, most preferably SEQ ID NO:16
   [0492] wherein one cell contains a substantially wild-type copy number of said polypeptide and the other cell contains higher than wild-type copy number of said polypeptide,
[0493] b. determining the sensitivity of said cells to a putative inhibitor, for instance by a growth assay, and
[0494] c. determining whether or not said two cells are differently affected by the presence of said putative inhibitor.
   Overexpression may be achieved using strong promoters or by introducing multiple copies of the structural gene for a surface-located polypeptide. As also overexpression of polypeptides that are not the cellular target of an inhibitor can make cells resistance to an inhibitor, inhibition of the target polypeptide of interest by a putative inhibitor will need to be verified by other means, such as e.g. a biochemical assay.

[0495] In addition to inhibitors of a biochemical or other cellular activity of a surface-located polypeptide, the cellular methods described above can be used to identify compounds that reduce the expression level of a target, and thereby its copy number, e.g. by interfering with gene regulation.

[0496] In preferred embodiments of the any of the cell-based- or biochemical methods for finding binding partners or inhibitors, the method is repeated for a plurality of candidate compounds.

[0497] In a further aspect, the invention relates to the mutant Streptococcus pneumoniae strains used in the cell-based methods described herein, such as strains in which the gene encoding the surface-located polypeptide is placed under the control of a heterologous regulatable promoter, strains carrying temperature-sensitive alleles of the surface-located polypeptides, and strains overexpressing the surface-located polypeptides.

[0498] Other methods of interfering with bacterial growth by targeting surface-located polypeptides, such as any of the polypeptides of SEQ ID NO:1-282 include suppression of gene expression using specific antisense molecules, such antisense RNA or DNA, and using ribozyme molecules specific for mRNA encoding the essential surface-located polypeptides.

### Example 1

### Strategy

[0499] The experimental steps in the project are as follows: Surface proteins were isolated by either high pH elution or by mutanolysin digestion. Isolated of surface proteins were identified by three complementary mass spectrometric based strategies: 1) 2-D SDS PAGE, 2) 1D SDS PAGE and 3) In-solution digest. All three strategies include protein identification by mass spectrometry analysis. The surface identified proteins are cloned into an E. coli expression vector. The expressed recombinant proteins are purified and used to immunise mice to verify immunogenicity of the antigens. The immunised mice are used in challenge studies in which the mice are challenged with Streptococcus pneumoniae and protection against disease and/or death is monitored.

### Mice:

[0500] Six-weeks-old BALB/c mice were housed under specific-pathogen-free conditions and given sterile food and water ad libitum.

### Bacteria:

[0501] Escherichia coli Top10 (Invitrogen) was used as the host for routine plasmid cloning. Recombinant proteins were expressed in E. coli BL21/(DE3) (Invitrogen). E. coli were cultured in Luria broth supplemented with antibiotics. Virulent S. pneumoniae strain D39 (serotype 2, purchased by Dr. M. Trombe, CICT, Toulouse, France) was used for proteomics, challenge experiments and as a source of genomic DNA for PCR amplification experiments. Clinical isolates of S. pneumoniae, including 40 serotypes responsible for the majority of pneumococcal infections were selected and purchased from the WHO Collaborating Centre for Reference and Research on Pneumococci in Copenhagen, Denmark. S. pneumoniae were routinely grown on blood agar plates (Difco).

Isolation of S. pneumoniae Cell Envelope Fraction:

[0502] Mutanolysin digestion of pneumococcal cell wall. Bacteria were grown overnight on blood agar plates, harvested into phosphate-buffered saline (PBS) containing 20% sucrose and pelleted by centrifugation at 6000 g for 10 minutes. The pellet was resuspended in 0.5 ml of osmotic digestion buffer (20% sucrose in 20 mM Tris-HCl, pH 7.0, 10 mM MgCl₂, protease inhibitor cocktail and 100 U/ml mutanolysin (Sigma) per plate. Enzymatic digestion was allowed to proceed for 1-2 h at 37° C. The intact protoplasts were removed by centrifugation at 7,000×g for 15 min. The supernatant was collected, acetone precipitated and analysed using mass spectrometry based techniques.

[0503] High pH elution of surface proteins. Bacteria were grown overnight on blood agar plates, harvested into PBS containing 20% sucrose and pelleted by centrifugation at 6000 g for 10 minutes. The pellet was resuspended in PBS containing 20% sucrose and centrifuged again as above. Then bacteria were resuspended in 2 ml of 50 mM glycine-NaOH (pH 12) containing 20% sucrose per plate. Alkali extraction of cell surface proteins was allowed to proceed for 30 minutes at room temperature with gentle shaking. The suspension was centrifuged at 15,000 g for 20 min, the supernatant was collected, adjusted to pH 7 with 1 M HCl, acetone precipitated and analysed by 1-D and 2-D gel electrophoresis.

### Surface Protein Identification:

[0504] The complex mixture of proteins obtained after surface extraction was analysed by three complementary strategies all based on mass spectrometry: 2D gel based strategy, 1D gel based strategy and In-solution digest strategy.

[0505] 2-D gel based strategy (2D-gel MALDI-TOF/TOF): Two-dimensional gel electrophoresis was performed either on the Ettan Dalt 2 system (Amersham Biosciences) or on the Novex NuPage system (Invitrogen) according to the manual provided with the gel system. In brief: First dimension runs were performed on either 7 cm or 24 cm pre-cast IPG strips (pH range 3-10 or 4-7) using the Ettan IPGphor isoelectric focusing system (Amersham Biosciences) according to the manufacturer's instructions. Isofocusing was performed at the following conditions: 7 cm strips: 8000 Vh, 24 cm strips: 52000 Vh. The second dimension was performed using pre-cast 12.5% gels (Amersham Biosciences) at 5 W per gel for 15 min then total 170 W for 4-6 hours for 24 cm strips. The 7 cm strips were run on the Novex NuPage system (Invitrogen) using pre-cast 4-12% gels (Invitrogen) at 200 volts for 40 minutes. Gels were silver stained according to a modified method described originally by Mortz et al. (2001) Proteomics 1(11), 1359-1363, and spots for mass spec analysis were picked using the Ettan Spot Picker from Amersham according to the manufacturer instructions.

[0506] Specific protein spots were spot-picked, and placed in Milli-Q water. These gel plugs were washed in 50 mM NH₄HCO₃/50% ethanol and dehydrated by incubation in 96% ethanol. Reduction and alkylation was performed by incubating in reducing solution (10 mM DTT, 50 mM NH₄HCO₃) at 56° C. followed by a room temperature incubation in alkylation solution (55 mM iodoacetamide, 50 mM NH₄HCO₃) in the dark. Two cycles of washing and dehydration were then performed prior to the addition of 5 ul trypsin solution (12.5 ng/ul Promega trypsin in 50 mM NH₄HCO₃, 10% Acetonitrile). Then an additional amount of sodium bicarbonate solution was added and the digests were incubated overnight at 37° C. Trifluoroacetic acid was added to the overnight digest followed by incubation with shaking.

[0507] Parts of the extract were used in MALDI-TOF peptide mass fingerprint and MALDI-TOF/TOF analysis (Ultraflex, Bruker Daltonics, Germany) and the peak-lists were used in database searching against a specific S. pneumoniae database. The Mascot search program and scoring algorithm (Matrix Science, UK) was used in database searching. Peptide mass tolerance was set to 60 ppm and 0.7 Da, respectively. Search parameters were adjusted to include oxidation of Met, the addition of Carbamidomethyl groups to Cys, and trypsin was allowed to miss one cleavage site per peptide.

[0508] 1D gel based strategy (GeLC-MS/MS): One-dimensional gel electrophoresis was performed on a Novex NuPage system (Invitrogen) according to the manual provided with the gel system. In brief we used, size 8 cm×8 cm, 1 mm thick pre-cast 12% bis-tris gels (Invitrogen) at 200 volts for 60 minutes in NuPage-MOPS-SDS running buffer. Gels were silver stained according to a modified method described originally by Mortz et al. (2001) Proteomics 1(11), 1359-1363. Whole lanes were cut out with razorblade in 0.5 cm gel slices. The gel slices were digested as described under 2D gel bases strategy, but the amount of trypsin was 20 ul trypsin solution (12.5 ng/ul Promega trypsin in 50 mM NH₄HCO₃, 10% Acetonitrile).

[0509] The extracts was analysed on a LC-MS/MS (Waters Cap-LC and Micromass Ultima TOF MS). Each extract was submitted to a 115 minutes LC-MS/MS analysis. The peak lists generated from the fragmented peptides were used in database searching against a specific Streptococcus pneumoniae database. The Mascot search program and scoring algorithm (Matrix Science, UK) was used in database searching. Peptide mass tolerance was set to 200 ppm and 0.4 Da for fragment ions. Search parameters were adjusted to include oxidation of Met, the addition of Carbamidomethyl groups to Cys, and trypsin was allowed to miss one cleavage site per peptide.

[0510] In-solution based strategy (ISD-MS/MS): The protein mixture was resuspended in 50 mM NH₄HCO₃, 10% Acetonitrile. Trypsin solution (50 μl) (12.5 ng/μl Promega trypsin in 50 mM NH₄HCO₃, 10% Acetonitrile) was added and the mixture was incubated overnight at 37° C. The digestion was stopped by acidification with TFA (final conc. 1%) and analysed by LC-MS/MS as described under 1D-based strategy. Database search was also performed as described under 1D-based strategy.

Detection of Genes for Protein Vaccine Candidates in Different S. pneumoniae Strains:

[0511] PCR amplification was used to demonstrate the presence of genes encoding antigens listed in clinical isolates of S. pneumoniae. For this purpose cells were grown on blood agar and diluted in PBS. Genomic DNAs were prepared from 40 pneumococcal strains by heating (95° C. for 5 min) and aliquots were used as templates for PCR amplification with Taq polymerase (Qiagen) with gene specific primers. Amplification products were electrophoresed through 1% agarose gels and visualized by staining with ethidium bromide (0.5 μg/ml).

### Reverse Transcription Polymerase Chain Reaction (RT-PCR):

[0512] A BALB/C mouse was infected with S. pneumoniae D39 as described below under Pneumococcal challenge. After 1 day of infection this mouse was sacrificed and the spleen was extracted and divided in two pieces. For isolation of intact total bacteria RNA from tissue, one half the organ was frozen quickly in liquid nitrogen and stored at −80° C. before RNA isolation. The other half of each organ was tested for bacteria using blood agar plates before RNA isolation (data not shown). Total RNA was isolated from animal tissue containing S. pneumoniae with the Rneasy Kit (Qiagen, Hilden). First-strand cDNA synthesis was performed with total RNA and the iScript Kit (Biorad). 1 μl cDNA were used for the subsequent PCR-step with gene specific primers.

### Production of Recombinant Vaccines (rec. vac.):

[0513] The production of recombinant vaccine was achieved by PCR amplification of pneumococcal genes, with subsequent cloning and expression of the genes in E. coli. Oligonucleotide primers used in PCR amplification experiments were all purchased from MWG, Germany. Pneumococcal genes used for protein expression were amplified from genomic DNA of S. pneumoniae strain D39 by using the high-fidelity thermostable DNA polymerase, Platinum Pfx (Life Technologies). The coding sequence was amplified with primers containing the start-codon but excluding the stop-codon of the open reading frame. The coding sequences used for protein expression were cloned into plasmid pET101 (invitrogen) using directional Topo cloning kit, with E. coli Top10 as the bacterial host. A plasmid-encoded C-terminal polyhistidine tag flanks each recombinant protein. For recombinant protein expression, each recombinant pET101 plasmid was subcloned into the E. coli strain BL21 (DE3). Recombinant protein expression was initiated by induction with IPTG (isopropyl-β-D-thiogalactopyranoside), and proteins were purified from the soluble fraction of recombinant E. coli lysates by using metal affinity chromatography resin and buffers (invitrogen), according to the manufacturer's instructions. Protein concentrations were estimated by using the BCA test (Hercules, Calif.). The recombinant proteins were dialyzed against PBS (Millipore) and stored at −80° C. Recombinant Proteins were identified with MALDI MS technology after purification.

### Western Blot Analysis:

[0514] Purified proteins were separated on one-dimensional (ca. 20 μg protein) SDS-PAGE and transferred to PVDF membranes. The immunological detection of immobilized proteins was performed after manufactures instructions (invitrogen). Patient sera were kindly provided by Dr. M. Trombe (CICT, Toulouse, France). We used a dilution of 1:100 with single and pooled patient sera for immunodetection. The dilution of the secondary antibody was 1:5000.

### Pneumococcal Challenge of Actively Immunized Mice:

[0515] BALB/C mice were used in challenge experiments (10 mice per group). For an antigen specific vaccination mice were primed with 25 μg of each antigen containing the ALUM adjuvant (100 μg) on day zero. Animals were boosted with the same antigen concentration on day 14 and day 28. We used untreated BALB/c mice and mice treated with an unrelated cellulose-binding domain CBD (sigma) as negative controls. All vaccines were administered subcutaneously (s.c.). All mice were bled on days 0, 21 and 36 and challenged on day 35 with S. pneumoniae D39. Individual sera from each immunized mouse were tested for the presence of specific antibodies prior to challenge. Virulent S. pneumoniae (D39) grown on blood agar plates was prepared for challenge via the intra peritoneal (i.p.) route in actively immunized mice or control groups. For challenge infections, mice were injected i.p. with approximately 10⁷ CFU per mouse of virulent S. pneumoniae strain D39 suspended in PBS. The actual number of CFU administered was determined retrospectively by plating serial dilutions of the inocula on blood agar. The survival of mice was monitored for 7 days, at which time the experiments were terminated.

### ELISA for Detection of Immunoglobulin G (IgG) Mouse:

[0516] Elisa assays were developed for detection of antigen specific IgG in mouse sera at day 0, day 21 and day 35 after vaccination. Different ELISA plates were coated with recombinant vaccines (2 μg) and whole cell lysates (2 μg) of S. pneumoniae D39. Two fold serial dilutions were made from mouse sera as a primary antibody. The dilution of the secondary antibody (goat anti mouse IgG, horse radish peroxidase conjugated) was 1:5000. OPD substrate was used for the color development. Plates were read at 492 nm. Results of IgG status at day 21 and day 35 after vaccination were compared with IgG status at day 0 of vaccination.

### Results:

[0517] We identified 282 different polypeptides in mutanolysin created cell-surface fractions of S. pneumoniae. Sequences of the identified polypeptides are given in FIG. 2. The methods that were employed identifies polypeptides that are expressed at a relatively high level. We used three different strategies for the detection of isolated S. pneumoniae surface proteins: a) a 2-D gel based strategy, b) a strategy with 1-D gels and LC_MS/MS and c) an in-solution based MS strategy. We selected ORFs of identified surface proteins for characterization. ORFs of genes were amplified with PCR and cloned directional into pET101. Recombinant proteins were expressed in E. coli as described in materials and methods. Four recombinant proteins were selected for further studies (table 3):

| | AnrP number | |
|---|---|---|
| Group# | (antigen#, short#) | Description |
| 1 | 230653 (1, 653) | hydrolase, putative [Streptococcus |
| | | pneumoniae TI; ca. 32 kDa (rec. vac.) |
| 2 | 516029 (2, 029) | lipoate-protein ligase, putative |
| | | [Streptococcus pneumoniae TIGR4]; |
| | | ca. 40 kDa (rec. vac.) |
| 3 | 800607 (3, 607) | ATP-dependent C1p protease, proteolytic |
| | | subunit; ca. 24 kDa (rec. vac.) |
| 4 | 944060 (4, 060) | autoinducer-2 production protein; |
| | | 21 kDa (rec. vac.) |

[0518] A PCR investigation demonstrated that genes of each of these 4 selected proteins are presented in 40 different serotypes of S. pneumoniae (table 4).

TABLE 4
PCR with different S. pneumoniae serotypes and specific primers for
following genes (+ = detected; − = not detected)

| Serotype | AnrP230653 | AnrP516029 | AnrP800607 | AnrP944060 |
|---|---|---|---|---|
| 1 | + | + | + | + |
| 2 | + | + | + | + |
| 3 | + | + | + | + |
| 4 | + | + | + | + |
| 5 | + | + | + | + |
| 6a | + | + | + | + |
| 6b | + | + | + | + |
| 7f | + | + | + | + |
| 7c | + | + | + | + |
| 8 | + | + | + | + |
| 9n | + | + | + | + |
| 9v | + | + | + | + |
| 9a | + | + | + | + |
| 10a | + | + | + | + |
| 10b | + | + | + | + |
| 11a | + | + | + | + |
| 12f | + | + | + | + |
| 13 | + | + | + | + |
| 14 | + | + | + | + |
| 15b | + | + | + | + |
| 15c | + | + | + | + |
| 16f | + | + | + | + |
| 17f | + | + | + | + |
| 18b | + | + | + | + |
| 18c | + | + | + | + |
| 19a | + | + | + | + |
| 19f | + | + | + | + |
| 20 | + | + | + | + |
| 22f | + | + | + | + |
| 23a | + | + | + | + |
| 23f | + | + | + | + |
| 28f | + | + | + | + |
| 31 | + | + | + | + |
| 31f | + | + | + | + |
| 32 | + | + | + | + |
| 33f | + | + | + | + |
| 34 | + | + | + | + |
| 35b | + | + | + | + |
| 35f | + | + | + | + |
| 38 | + | + | + | + |

[0519] For identification of transcripts of these 4 genes we made a RT-PCR analysis. A BALB/C mouse was infected with S. pneumoniae and total RNA was isolated from spleen after day 1 of infection. RT-PCRs with RNAs from spleen demonstrated that the selected genes are expressed in S. pneumoniae after animal infection (FIG. 3). In addition Western Blots (WB) with patient sera were made for testing the immunogenicity of proteins listed in table 3. Furthermore 3 additional proteins (144, AnrP454144 (14 kDa rec. vac.); 487, AnrP98487 (32 kDa); 646; AnrP373646 (25 kDa)) were also tested for immunogenicity with Western Blot. We detected recombinant vaccines 029, 060, 607, 646 and 653 in immunoblots (WBs) with sera isolated from a single patient (FIG. 4) or pooled from different patients (data not shown). In WBs unspecific signals or no signals were detected for purified proteins 144 and 487, however, lack of a signal does not exclude that these two proteins may be suitable as vaccines.

[0520] We vaccinated mice with proteins in table 3 as a protein vaccine and tested the protection efficiency against S. pneumoniae. Antigens were prepared with alum and injected subcutaneously into BALB/C mice at three time points (day 0, 14, 28). For negative controls, mice were left untreated (group 5) or treated with 100 kg alum (group 6) or with an unrelated protein (group 7). We tested the immunogenicity of each protein at day 0, day 21 and day 35 of vaccination with an ELISA assay. Mice produced immunoglobulin (IgG) against antigens 029, 060, 607, and 653 (FIG. 5). No immune response against pneumococcal antigens was detected as expected in animals of groups 5, 6 and 7. For the bacterial challenge, each mouse was infected with S. pneumoniae D39 (1 CFU per mouse) at day 35 of vaccination. Mice derived from two groups, vaccinated with proteins 029 and 607 demonstrated a lower mortality and a lower CFU-titre after infection with this S. pneumoniae strain (FIG. 6, FIG. 7). Proteins 060 and 653 also showed a trend towards lower CFU-titre (FIG. 6).

[0521] In order to investigate variations in sequence between different strains of Streptococcus pneumoniae, the sequences of antigens 029 and 607 were partially determined from serotypes 15b, 15c, and 35f, and from Streptococcus pneumoniae strain D39. These sequences were compared with database sequences of 029 and 607 from type 4 (TIGR) and R6 (Sanger Center). The region of 029 from amino acid position 1 to amino acid position 315 showed more than 98% sequence identity on amino acid level between the six strains. For 607, more than 98% sequence identity on amino acid level between the six strains was found in the region from position 20 to position 190. These data indicate that 029 and 607 are well-conserved across different strains.

[0522] The structure of antigen 029 (SEQ ID NO:16) (putative lipoate protein ligase) has been determined and is accessible under accession number 1VQZ in the PDB (Protein Data Bank) and HSSP databases of EBI, the European Bioinformatics Institute. Surface-exposed regions were predicted by identification of amino acids with high water accessibility (ACC), which at the same time should have a low variability (VAR) in sequence (see table below). The amino acid stretches of different areas separated by several amino acids are adjacent in the 3D structure and are therefore paired together.

### Amino Acids Exposed on the Surface:

| | | | |
|---|---|---|---|
| Amino acid | | | |
| No. | Amino acid | ACC | VAR |

| | | | |
|---|---|---|---|
| 127 | I | 7 | 21 |
| 128 | D | 139 | 26 |
| 129 | G | 36 | 18 |
| 155 | D | 78 | 20 |
| 156 | L | 90 | 24 |
| 157 | S | 72 | 35 |
| 158 | V | 9 | 49 |
| 159 | L | 53 | 14 |
| 160 | A | 83 | 42 |
| 166 | S | 15 | 37 |
| 167 | K | 102 | 35 |
| 168 | D | 59 | 37 |
| 169 | K | 74 | 7 |
| 170 | F | 34 | 22 |
| 171 | E | 92 | 41 |
| 172 | S | 86 | 26 |
| 173 | K | 39 | 13 |
| 174 | G | 64 | 10 |
| 175 | V | 78 | 11 |
| 176 | K | 96 | 28 |
| 177 | S | 77 | 0 |
| 178 | V | 100 | 11 |
| 179 | R | 102 | 20 |
| 180 | A | 86 | 32 |
| 185 | I | 0 | 14 |
| 186 | I | 44 | 48 |
| 187 | N | 110 | 32 |
| 188 | E | 51 | 46 |
| 189 | L | 18 | 18 |
| 190 | P | 102 | 42 |
| 191 | K | 70 | 36 |
| 195 | V | 1 | 43 |
| 196 | E | 84 | 26 |
| 197 | K | 112 | 39 |
| 198 | F | 0 | 22 |
| 199 | R | 37 | 43 |
| 200 | D | 72 | 40 |
| 201 | L | 33 | 42 |
| 202 | L | 0 | 25 |
| 203 | L | 24 | 38 |
| 204 | E | 116 | 46 |
| 207 | K | 65 | 51 |
| 208 | K | 102 | 41 |
| 209 | E | 81 | 50 |
| 210 | Y | 42 | 50 |
| 211 | P | 107 | 46 |

155-160 + 185-191 [DLSVLA (SEQ ID NO:289)/IINELPK (SEQ ID NO:290)]
127-128 + 166-180 [IDG/SKDKFESKGVKSVRA (SEQ ID NO:291)]
195-204 + 207-211 [VEKFRDLLLE (SEQ ID NO:292)/KKEYP (SEQ ID NO:293)]

1. A composition for use as a medicament, comprising one of the group consisting of:
a) an antibody capable of binding a polypeptide selected from the group consisting of
SEQ ID NO:1, SEQ ID NO:2, SEQ ID NO:3, SEQ ID NO:4, SEQ ID NO:5, SEQ ID NO:6, SEQ ID NO:7, SEQ ID NO:8, SEQ ID NO:9, SEQ ID NO:10, SEQ ID NO:11, SEQ ID NO:12, SEQ ID NO:13, SEQ ID NO:14, SEQ ID NO:15, SEQ ID NO:16, SEQ ID NO:17, SEQ ID NO:18, SEQ ID NO:19, SEQ ID NO:20, SEQ ID NO:21, SEQ ID NO:22, SEQ ID NO:23, SEQ ID NO:24, SEQ ID NO:25, SEQ ID NO:26, SEQ ID NO:27, SEQ ID NO:28, SEQ ID NO:29, SEQ ID NO:30, SEQ ID NO:31, SEQ ID NO:32, SEQ ID NO:33, SEQ ID NO:34, SEQ ID NO:35, SEQ ID NO:36, SEQ ID NO:37, SEQ ID NO:38, SEQ ID NO:39, SEQ ID NO:40, SEQ ID NO:41, SEQ ID NO:42, SEQ ID NO:43, SEQ ID NO:44, SEQ ID NO:45, SEQ ID NO:46, SEQ ID NO:47, SEQ ID NO:48, SEQ ID NO:49, SEQ ID NO:50, SEQ ID NO:51, SEQ ID NO:52, SEQ ID NO:53, SEQ ID NO:54, SEQ ID NO:55, SEQ ID NO:56, SEQ ID NO:57, SEQ ID NO:58, SEQ ID NO:59, SEQ ID NO:60, SEQ ID NO:61, SEQ ID NO:62, SEQ ID NO:63, SEQ ID NO:64, SEQ ID NO:65, SEQ ID NO:66, SEQ ID NO:67, SEQ ID NO:68, SEQ ID NO:69, SEQ ID NO:70, SEQ ID NO:71, SEQ ID NO:72, SEQ ID NO:73, SEQ ID NO:74, SEQ ID NO:75, SEQ ID NO:76, SEQ ID NO:77, SEQ ID NO:78, SEQ ID NO:79, SEQ ID NO:80, SEQ ID NO:81, SEQ ID NO:82, SEQ ID NO:83, SEQ ID NO:84, SEQ ID NO:85, SEQ ID NO:86, SEQ ID NO:87, SEQ ID NO:88, SEQ ID NO:89, SEQ ID NO:90, SEQ ID NO:91, SEQ ID NO:92, SEQ ID NO:93, SEQ ID NO:94, SEQ ID NO:95, SEQ ID NO:96, SEQ ID NO:97, SEQ ID NO:98, SEQ ID NO:99, SEQ ID NO:100, SEQ ID NO:101, SEQ ID NO:102, SEQ ID NO:103, SEQ ID NO:104, SEQ ID NO:105, SEQ ID NO:106, SEQ ID NO:107, SEQ ID NO:108, SEQ ID NO:109, SEQ ID NO:110, SEQ ID NO:112, SEQ ID NO:113, SEQ ID NO:114, SEQ ID NO:115, SEQ ID NO:116, SEQ ID NO:117, SEQ ID NO:118, SEQ ID NO:119, SEQ ID NO:120, SEQ ID NO:121, SEQ ID NO:122, SEQ ID NO:123, SEQ ID NO:124, SEQ ID NO:125, SEQ ID NO:126, SEQ ID NO:127, SEQ ID NO:128, SEQ ID NO:129, SEQ ID NO:130, SEQ ID NO:131, SEQ ID NO:132, SEQ ID NO:133, SEQ ID NO:134, SEQ ID NO:135, SEQ ID NO:136, SEQ ID NO:137, SEQ ID NO:138, SEQ ID NO:139, SEQ ID NO:140, SEQ ID NO:141, SEQ ID NO:142, SEQ ID NO:143, SEQ ID NO:144, SEQ ID NO:145, SEQ ID NO:146, SEQ ID NO:147, SEQ ID NO:148, SEQ ID NO:149, SEQ ID NO:150, SEQ ID NO:151, SEQ ID NO:152, SEQ ID NO:153, SEQ ID NO:154, SEQ ID NO:155, SEQ ID NO:156, SEQ ID NO:157, SEQ ID NO:158, SEQ ID NO:159, SEQ ID NO:160, SEQ ID NO:161, SEQ ID NO:162, SEQ ID NO:163, SEQ ID NO:164, SEQ ID NO:165, SEQ ID NO:166, SEQ ID NO:167, SEQ ID NO:168, SEQ ID NO:169, SEQ ID NO:170, SEQ ID NO:171, SEQ ID NO:172, SEQ ID NO:173, SEQ ID NO:174, SEQ ID NO:175, SEQ ID NO:176, SEQ ID NO:177, SEQ ID NO:178, SEQ ID NO:179, SEQ ID NO:180, SEQ ID NO:181, SEQ ID NO:182, SEQ ID NO:183, SEQ ID NO:184, SEQ ID NO:185, SEQ ID NO:186, SEQ ID NO:187, SEQ ID NO:188, SEQ ID NO:189, SEQ ID NO:190, SEQ ID NO:191, SEQ ID NO:192, SEQ ID NO:193, SEQ ID NO:194, SEQ ID NO:195, SEQ ID NO:196, SEQ ID NO:197, SEQ ID NO:198, SEQ ID NO:199, SEQ ID NO:200, SEQ ID NO:201, SEQ ID NO:202, SEQ ID NO:203, SEQ ID NO:204, SEQ ID NO:205, SEQ ID NO:206, SEQ ID NO:207, SEQ ID NO:208, SEQ ID NO:209, SEQ ID NO:210, SEQ ID NO:211, SEQ ID NO:212, SEQ ID NO:213, SEQ ID NO:214, SEQ ID NO:215, SEQ ID NO:216, SEQ ID NO:217, SEQ ID NO:218, SEQ ID NO:219, SEQ ID NO:220, SEQ ID NO:221, SEQ ID NO:222, SEQ ID NO:223, SEQ ID NO:224, SEQ ID NO:225, SEQ ID NO:226, SEQ ID NO:227, SEQ ID NO:228, SEQ ID NO:229, SEQ ID NO:230, SEQ ID NO:231, SEQ ID NO:232, SEQ ID NO:233, SEQ ID NO:234, SEQ ID NO:235, SEQ ID NO:236, SEQ ID NO:237, SEQ ID NO:238, SEQ ID NO:239, SEQ ID NO:240, SEQ ID NO:241, SEQ ID NO:242, SEQ ID NO:243, SEQ ID NO:244, SEQ ID NO:245, SEQ ID NO:246, SEQ ID NO:247, SEQ ID NO:248, SEQ ID NO:249, SEQ ID NO:250, SEQ ID NO:251, SEQ ID NO:252, SEQ ID NO:253, SEQ ID NO:254, SEQ ID NO:255, SEQ ID NO:256, SEQ ID NO:257, SEQ ID NO:258, SEQ ID NO:259, SEQ ID NO:260, SEQ ID NO:261, SEQ ID NO:262, SEQ ID NO:263, SEQ ID NO:264, SEQ ID NO:265, SEQ ID NO:266, SEQ ID NO:267, SEQ ID NO:268, SEQ ID NO:269, SEQ ID NO:270, SEQ ID NO:271, SEQ ID NO:272, SEQ ID NO:273, SEQ ID NO:274, SEQ ID NO:275, SEQ ID NO:276, SEQ ID NO:277, SEQ ID NO:278, SEQ ID NO:279, SEQ ID NO:280, SEQ ID NO:281, and SEQ ID NO:282,
b) a polypeptide selected from the group consisting of the polypeptides of SEQ ID NO:1, SEQ ID NO:2, SEQ ID NO:3, SEQ ID NO:4, SEQ ID NO:5, SEQ ID NO:6, SEQ ID NO:7, SEQ ID NO:8, SEQ ID NO:9, SEQ ID NO:10, SEQ ID NO:11, SEQ ID NO:12, SEQ ID NO:13, SEQ ID NO:14, SEQ ID NO:15, SEQ ID NO:16, SEQ ID NO:17, SEQ ID NO:18, SEQ ID NO:19, SEQ ID NO:20, SEQ ID NO:21, SEQ ID NO:22, SEQ ID NO:23, SEQ ID NO:24, SEQ ID NO:25, SEQ ID NO:26, SEQ ID NO:27, SEQ ID NO:28, SEQ ID NO:29, SEQ ID NO:30, SEQ ID NO:31, SEQ ID NO:32, SEQ ID NO:33, SEQ ID NO:34, SEQ ID NO:35, SEQ ID NO:36, SEQ ID NO:37, SEQ ID NO:38, SEQ ID NO:39, SEQ ID NO:40, SEQ ID NO:41, SEQ ID NO:42, SEQ ID NO:43, SEQ ID NO:44, SEQ ID NO:45, SEQ ID NO:46, SEQ ID NO:47, SEQ ID NO:48, SEQ ID NO:49, SEQ ID NO:50, SEQ ID NO:51, SEQ ID NO:52, SEQ ID NO:53, SEQ ID NO:54, SEQ ID NO:55, SEQ ID NO:56, SEQ ID NO:57, SEQ ID NO:58, SEQ ID NO:59, SEQ ID NO:60, SEQ ID NO:61, SEQ ID NO:62, SEQ ID NO:63, SEQ ID NO:64, SEQ ID NO:65, SEQ ID NO:66, SEQ ID NO:67, SEQ ID NO:68, SEQ ID NO:69, SEQ ID NO:70, SEQ ID NO:71, SEQ ID NO:72, SEQ ID NO:73, SEQ ID NO:74, SEQ ID NO:75, SEQ ID NO:76, SEQ ID NO:77, SEQ ID NO:78, SEQ ID NO:79, SEQ ID NO:80, SEQ ID NO:81, SEQ ID NO:82, SEQ ID NO:83, SEQ ID NO:84, SEQ ID NO:85, SEQ ID NO:86, SEQ ID NO:87, SEQ ID NO:88, SEQ ID NO:89, SEQ ID NO:90, SEQ ID NO:91, SEQ ID NO:92, SEQ ID NO:93, SEQ ID NO:94, SEQ ID NO:95, SEQ ID NO:96, SEQ ID NO:97, SEQ ID NO:98, SEQ ID NO:99, SEQ ID NO:100, SEQ ID NO:101, SEQ ID NO:102, SEQ ID NO:103, SEQ ID NO:104, SEQ ID NO:105, SEQ ID NO:106, SEQ ID NO:107, SEQ ID NO:108, SEQ ID NO:109, SEQ ID NO:110, SEQ ID NO:112, SEQ ID NO:113, SEQ ID NO:114, SEQ ID NO:115, SEQ ID NO:116, SEQ ID NO:117, SEQ ID NO:118, SEQ ID NO:119, SEQ ID NO:120, SEQ ID NO:121, SEQ ID NO:122, SEQ ID NO:123, SEQ ID NO:124, SEQ ID NO:125, SEQ ID NO:126, SEQ ID NO:127, SEQ ID NO:128, SEQ ID NO:129, SEQ ID NO:130, SEQ ID NO:131, SEQ ID NO:132, SEQ ID NO:133, SEQ ID NO:134, SEQ ID NO:135, SEQ ID NO:136, SEQ ID NO:137, SEQ ID NO:138, SEQ ID NO:139, SEQ ID NO:140, SEQ ID NO:141, SEQ ID NO:142, SEQ ID NO:143, SEQ ID NO:144, SEQ ID NO:145, SEQ ID NO:146, SEQ ID NO:147, SEQ ID NO:148, SEQ ID NO:149, SEQ ID NO:150, SEQ ID NO:151, SEQ ID NO:152, SEQ ID NO:153, SEQ ID NO:154, SEQ ID NO:155, SEQ ID NO:156, SEQ ID NO:157, SEQ ID NO:158, SEQ ID NO:159, SEQ ID NO:160, SEQ ID NO:161, SEQ ID NO:162, SEQ ID NO:163, SEQ ID NO:164, SEQ ID NO:165, SEQ ID NO:166, SEQ ID NO:167, SEQ ID NO:168, SEQ ID NO:169, SEQ ID NO:170, SEQ ID NO:171, SEQ ID NO:172, SEQ ID NO:173, SEQ ID NO:174, SEQ ID NO:175, SEQ ID NO:176, SEQ ID NO:177, SEQ ID NO:178, SEQ ID NO:179, SEQ ID NO:180, SEQ ID NO:181, SEQ ID NO:182, SEQ ID NO:183, SEQ ID NO:184, SEQ ID NO:185, SEQ ID NO:186, SEQ ID NO:187, SEQ ID NO:188, SEQ ID NO:189, SEQ ID NO:190, SEQ ID NO:191, SEQ ID NO:192, SEQ ID NO:193, SEQ ID NO:194, SEQ ID NO:195, SEQ ID NO:196, SEQ ID NO:197, SEQ ID NO:198, SEQ ID NO:199, SEQ ID NO:200, SEQ ID NO:201, SEQ ID NO:202, SEQ ID NO:203, SEQ ID NO:204, SEQ ID NO:205, SEQ ID NO:206, SEQ ID NO:207, SEQ ID NO:208, SEQ ID NO:209, SEQ ID NO:210, SEQ ID NO:211, SEQ ID NO:212, SEQ ID NO:213, SEQ ID NO:214, SEQ ID NO:215, SEQ ID NO:216, SEQ ID NO:217, SEQ ID NO:218, SEQ ID NO:219, SEQ ID NO:220, SEQ ID NO:221, SEQ ID NO:222, SEQ ID NO:223, SEQ ID NO:224, SEQ ID NO:225, SEQ ID NO:226, SEQ ID NO:227, SEQ ID NO:228, SEQ ID NO:229, SEQ ID NO:230, SEQ ID NO:231, SEQ ID NO:232, SEQ ID NO:233, SEQ ID NO:234, SEQ ID NO:235, SEQ ID NO:236, SEQ ID NO:237, SEQ ID NO:238, SEQ ID NO:239, SEQ ID NO:240, SEQ ID NO:241, SEQ ID NO:242, SEQ ID NO:243, SEQ ID NO:244, SEQ ID NO:245, SEQ ID NO:246, SEQ ID NO:247, SEQ ID NO:248, SEQ ID NO:249, SEQ ID NO:250, SEQ ID NO:251, SEQ ID NO:252, SEQ ID NO:253, SEQ ID NO:254, SEQ ID NO:255, SEQ ID NO:256, SEQ ID NO:257, SEQ ID NO:258, SEQ ID NO:259, SEQ ID NO:260, SEQ ID NO:261, SEQ ID NO:262, SEQ ID NO:263, SEQ ID NO:264, SEQ ID NO:265, SEQ ID NO:266, SEQ ID NO:267, SEQ ID NO:268, SEQ ID NO:269, SEQ ID NO:270, SEQ ID NO:271, SEQ ID NO:272, SEQ ID NO:273, SEQ ID NO:274, SEQ ID NO:275, SEQ ID NO:276, SEQ ID NO:277, SEQ ID NO:278, SEQ ID NO:279, SEQ ID NO:280, SEQ ID NO:281, and SEQ ID NO:282.
c) an antigenic fragment of said polypeptide,
d) a variant of said polypeptide.
e) a polynucleotide comprising a sequence encoding said polypeptide,
f) an expression vector comprising a sequence encoding said polypeptide, and
g) a recombinant virus or recombinant cell comprising said polynucleotide or said expression vector.

2. The composition of claim 1, wherein a minimum sequence identity of said variant of said polypeptide with said sequence is selected from the group consisting of 95%, 96%, 97% 98%, and 99%.

3. The composition of claim 1, wherein a percentage of the full length of said sequence contained in said antigenic fragment is less than a value selected from the group consisting of 99%, 75%, 50%, 25%, 20%, 15%, and 10%.

4. The composition of claim 1, wherein the number of consecutive amino acid residues of said sequence contained within said antigenic fragment is less than a number selected from the group consisting of 70, 50, 40, 30, and 20.

5. The composition of claim 1, wherein the minimum number of consecutive amino acids of said sequence contained within said antigenic fragment is selected from the group consisting of 6, 7, 8, 9, and 10.

6. The composition of claim 1, wherein the composition comprises at least two polypeptides selected from the group consisting of SEQ ID NO:1, SEQ ID NO:2, SEQ ID NO:3, SEQ ID NO:4, SEQ ID NO:5, SEQ ID NO:6, SEQ ID NO:7, SEQ ID NO:8, SEQ ID NO:9, SEQ ID NO:110, SEQ ID NO:11, SEQ ID NO:12, SEQ ID NO:13, SEQ ID NO:14, SEQ ID NO:15, SEQ ID NO:16, SEQ ID NO:17, SEQ ID NO:18, SEQ ID NO:19, SEQ ID NO:20, SEQ ID NO:21, SEQ ID NO:22, SEQ ID NO:23, SEQ ID NO:24, SEQ ID NO:25, SEQ ID NO:26, SEQ ID NO:27, SEQ ID NO:28, SEQ ID NO:29, SEQ ID NO:30, SEQ ID NO:31, SEQ ID NO:32, SEQ ID NO:33, SEQ ID NO:34, SEQ ID NO:35, SEQ ID NO:36, SEQ ID NO:37, SEQ ID NO:38, SEQ ID NO:39, SEQ ID NO:40, SEQ ID NO:41, SEQ ID NO:42, SEQ ID NO:43, SEQ ID NO:44, SEQ ID NO:45, SEQ ID NO:46, SEQ ID NO:47, SEQ ID NO:48, SEQ ID NO:49, SEQ ID NO:50, SEQ ID NO:51, SEQ ID NO:52, SEQ ID NO:53, SEQ ID NO:54, SEQ ID NO:55, SEQ ID NO:56, SEQ ID NO:57, SEQ ID NO:58, SEQ ID NO:59, SEQ ID NO:60, SEQ ID NO:61, SEQ ID NO:62, SEQ ID NO:63, SEQ ID NO:64, SEQ ID NO:65, SEQ ID NO:66, SEQ ID NO:67, SEQ ID NO:68, SEQ ID NO:69, SEQ ID NO:70, SEQ ID NO:71, SEQ ID NO:72, SEQ ID NO:73, SEQ ID NO:74, SEQ ID NO:75, SEQ ID NO:76, SEQ ID NO:77, SEQ ID NO:78, SEQ ID NO:79, SEQ ID NO:80, SEQ ID NO:81, SEQ ID NO:82, SEQ ID NO:83, SEQ ID NO:84, SEQ ID NO:85, SEQ ID NO:86, SEQ ID NO:87, SEQ ID NO:88, SEQ ID NO:89, SEQ ID NO:90, SEQ ID NO:91, SEQ ID NO:92, SEQ ID NO:93, SEQ ID NO:94, SEQ ID NO:95, SEQ ID NO:96, SEQ ID NO:97, SEQ ID NO:98, SEQ ID NO:99, SEQ ID NO:100, SEQ ID NO:101, SEQ ID NO:102, SEQ ID NO:103, SEQ ID NO:104, SEQ ID NO:105, SEQ ID NO:106, SEQ ID NO:107, SEQ ID NO:108, SEQ ID NO:109, SEQ ID NO:110, SEQ ID NO:112, SEQ ID NO:113, SEQ ID NO:114, SEQ ID NO:115, SEQ ID NO:116, SEQ ID NO:117, SEQ ID NO:118, SEQ ID NO:119, SEQ ID NO:120, SEQ ID NO:121, SEQ ID NO:122, SEQ ID NO:123, SEQ ID NO:124, SEQ ID NO:125, SEQ ID NO:126, SEQ ID NO:127, SEQ ID NO:128, SEQ ID NO:129, SEQ ID NO:130, SEQ ID NO:131, SEQ ID NO:132, SEQ ID NO:133, SEQ ID NO:134, SEQ ID NO:135, SEQ ID NO:136, SEQ ID NO:137, SEQ ID NO:138, SEQ ID NO:139, SEQ ID NO:140, SEQ ID NO:141, SEQ ID NO:142, SEQ ID NO:143, SEQ ID NO:144, SEQ ID NO:145, SEQ ID NO:146, SEQ ID NO:147, SEQ ID NO:148, SEQ ID NO:149, SEQ ID NO:150, SEQ ID NO:151, SEQ ID NO:152, SEQ ID NO:153, SEQ ID NO:154, SEQ ID NO:155, SEQ ID NO:156, SEQ ID NO:157, SEQ ID NO:158, SEQ ID NO:159, SEQ ID NO:160, SEQ ID NO:161, SEQ ID NO:162, SEQ ID NO:163, SEQ ID NO:164, SEQ ID NO:165, SEQ ID NO:166, SEQ ID NO:167, SEQ ID NO:168, SEQ ID NO:169, SEQ ID NO:170, SEQ ID NO:171, SEQ ID NO:172, SEQ ID NO:173, SEQ ID NO:174, SEQ ID NO:175, SEQ ID NO:176, SEQ ID NO:177, SEQ ID NO:178, SEQ ID NO:179, SEQ ID NO:180, SEQ ID NO:181, SEQ ID NO:182, SEQ ID NO:183, SEQ ID NO:184, SEQ ID NO:185, SEQ ID NO:186, SEQ ID NO:187, SEQ ID NO:188, SEQ ID NO:189, SEQ ID NO:190, SEQ ID NO:191, SEQ ID NO:192, SEQ ID NO:193, SEQ ID NO:194, SEQ ID NO:195, SEQ ID NO:196, SEQ ID NO:197, SEQ ID NO:198, SEQ ID NO:199, SEQ ID NO:200, SEQ ID NO:201, SEQ ID NO:202, SEQ ID NO:203, SEQ ID NO:204, SEQ ID NO:205, SEQ ID NO:206, SEQ ID NO:207, SEQ ID NO:208, SEQ ID NO:209, SEQ ID NO:210, SEQ ID NO:211, SEQ ID NO:212, SEQ ID NO:213, SEQ ID NO:214, SEQ ID NO:215, SEQ ID NO:216, SEQ ID NO:217, SEQ ID NO:218, SEQ ID NO:219, SEQ ID NO:220, SEQ ID NO:221, SEQ ID NO:222, SEQ ID NO:223, SEQ ID NO:224, SEQ ID NO:225, SEQ ID NO:226, SEQ ID NO:227, SEQ ID NO:228, SEQ ID NO:229, SEQ ID NO:230, SEQ ID NO:231, SEQ ID NO:232, SEQ ID NO:233, SEQ ID NO:234, SEQ ID NO:235, SEQ ID NO:236, SEQ ID NO:237, SEQ ID NO:238, SEQ ID NO:239, SEQ ID NO:240, SEQ ID NO:241, SEQ ID NO:242, SEQ ID NO:243, SEQ ID NO:244, SEQ ID NO:245, SEQ ID NO:246, SEQ ID NO:247, SEQ ID NO:248, SEQ ID NO:249, SEQ ID NO:250, SEQ ID NO:251, SEQ ID NO:252, SEQ ID NO:253, SEQ ID NO:254, SEQ ID NO:255, SEQ ID NO:256, SEQ ID NO:257, SEQ ID NO:258, SEQ ID NO:259, SEQ ID NO:260, SEQ ID NO:261, SEQ ID NO:262, SEQ ID NO:263, SEQ ID NO:264, SEQ ID NO:265, SEQ ID NO:266, SEQ ID NO:267, SEQ ID NO:268, SEQ ID NO:269, SEQ ID NO:270, SEQ ID NO:271, SEQ ID NO:272, SEQ ID NO:273, SEQ ID NO:274, SEQ ID NO:275, SEQ ID NO:276, SEQ ID NO:277, SEQ ID NO:278, SEQ ID NO:279, SEQ ID NO:280, SEQ ID NO:281, and SEQ ID NO:282.

7-13. (canceled)

14. The composition of claim 1, wherein said polypeptide comprises an affinity tag.

15. The composition of claim 1, wherein said recombinant cell is an attenuated or reduced-virulence Escherichia coli cell or an attenuated or reduced-virulence Salmonella cell.

16. The composition of claim 1, wherein said recombinant cell is alive.

17. The composition of claim 1, wherein said recombinant cell is dead.

18. The composition of claim 1, wherein the medicament is a vaccine.

19. The composition of claim 1, further comprising an immunogenic carrier, wherein the immunogenic carrier is bound to said polypeptide.

20. The composition of claim 1, further comprising an adjuvant.

21. The composition of claim 1, wherein said antibody is capable of binding an intact Streptococcus pneumoniae cell.

22. The composition of claim 1, wherein said antibody is polyclonal.

23. The composition of claim 1, wherein said antibody is monoclonal.

24. The composition of claim 1, wherein said antibody is a human antibody or humanized antibody.

25. The composition of claim 1, wherein the antibody is an antigen-binding fragment of an antibody.

26. The composition of claim 1, wherein the antibody has a dissociation constant Kd of less than a value selected from the group consisting of 5×10⁻⁶ M, 10⁻⁶ M, 5×10⁻⁷M, 10⁻⁷M, 5×10⁻⁸M, 10⁻⁸M, 5×10⁻⁹M, 10⁻⁹M, 5×10⁻¹⁰M, 10⁻¹⁰M, 5×10⁻¹¹M, 10⁻¹¹M, 5×10⁻¹²M, 10⁻¹²M, 5×10⁻¹³M, 10⁻¹³M, 5×10⁻¹⁴Mg, 5×10⁻¹⁵M, 10⁻¹⁵M.

27. The composition of claim 1, wherein said composition additionally comprises a pharmaceutically-acceptable carrier.

28. The composition of claim 1, wherein the composition is suitable for systemic administration.

29. The composition of claim 1, wherein said composition is suitable for a mode of administration selected from the group consisting of intravenous, intramuscular, and subcutaneous administration.

30. The composition of claim 1, wherein said composition is suitable for oral administration.

31. The composition of claim 1, wherein said composition is suitable for intranasal administration.

32. An antibody capable of binding a polypeptide having an amino acid sequence selected from the group consisting of preferably selected from the group consisting of SEQ ID NO:1, SEQ ID NO:2, SEQ ID NO:3, SEQ ID NO:4, SEQ ID NO:5, SEQ ID NO:6, SEQ ID NO:7, SEQ ID NO:8, SEQ ID NO:9, SEQ ID NO:10, SEQ ID NO:11, SEQ ID NO:12, SEQ ID NO:13, SEQ ID NO:14, SEQ ID NO:15, SEQ ID NO:16, SEQ ID NO:17, SEQ ID NO:18, SEQ ID NO:19, SEQ ID NO:20, SEQ ID NO:21, SEQ ID NO:22, SEQ ID NO:23, SEQ ID NO:24, SEQ ID NO:25, SEQ ID NO:26, SEQ ID NO:27, SEQ ID NO:28, SEQ ID NO:29, SEQ ID NO:30, SEQ ID NO:31, SEQ ID NO:32, SEQ ID NO:33, SEQ ID NO:34, SEQ ID NO:35, SEQ ID NO:36, SEQ ID NO:37, SEQ ID NO:38, SEQ ID NO:39, SEQ ID NO:40, SEQ ID NO:41, SEQ ID NO:42, SEQ ID NO:43, SEQ ID NO:44, SEQ ID NO:45, SEQ ID NO:46, SEQ ID NO:47, SEQ ID NO:48, SEQ ID NO:49, SEQ ID NO:50, SEQ ID NO:51, SEQ ID NO:52, SEQ ID NO:53, SEQ ID NO:54, SEQ ID NO:55, SEQ ID NO:56, SEQ ID NO:57, SEQ ID NO:58, SEQ ID NO:59, SEQ ID NO:60, SEQ ID NO:61, SEQ ID NO:62, SEQ ID NO:63, SEQ ID NO:64, SEQ ID NO:65, SEQ ID NO:66, SEQ ID NO:67, SEQ ID NO:68, SEQ ID NO:69, SEQ ID NO:70, SEQ ID NO:71, SEQ ID NO:72, SEQ ID NO:73, SEQ ID NO:74, SEQ ID NO:75, SEQ ID NO:76, SEQ ID NO:77, SEQ ID NO:78, SEQ ID NO:79, SEQ ID NO:80, SEQ ID NO:81, SEQ ID NO:82, SEQ ID NO:83, SEQ ID NO:84, SEQ ID NO:85, SEQ ID NO:86, SEQ ID NO:87, SEQ ID NO:88, SEQ ID NO:89, SEQ ID NO:90, SEQ ID NO:91, SEQ ID NO:92, SEQ ID NO:93, SEQ ID NO:94, SEQ ID NO:95, SEQ ID NO:96, SEQ ID NO:97, SEQ ID NO:98, SEQ ID NO:99, SEQ ID NO:100, SEQ ID NO:101, SEQ ID NO:102, SEQ ID NO:103, SEQ ID NO:104, SEQ ID NO:105, SEQ ID NO:106, SEQ ID NO:107, SEQ ID NO:108, SEQ ID NO:109, SEQ ID NO:110, SEQ ID NO:112, SEQ ID NO:113, SEQ ID NO:114, SEQ ID NO:115, SEQ ID NO:116, SEQ ID NO:117, SEQ ID NO:118, SEQ ID NO:119, SEQ ID NO:120, SEQ ID NO:121, SEQ ID NO:122, SEQ ID NO:123, SEQ ID NO:124, SEQ ID NO:125, SEQ ID NO:126, SEQ ID NO:127, SEQ ID NO:128, SEQ ID NO:129, SEQ ID NO:130, SEQ ID NO:131, SEQ ID NO:132, SEQ ID NO:133, SEQ ID NO:134, SEQ ID NO:135, SEQ ID NO:136, SEQ ID NO:137, SEQ ID NO:138, SEQ ID NO:139, SEQ ID NO:140, SEQ ID NO:141, SEQ ID NO:142, SEQ ID NO:143, SEQ ID NO:144, SEQ ID NO:145, SEQ ID NO:146, SEQ ID NO:147, SEQ ID NO:148, SEQ ID NO:149, SEQ ID NO:150, SEQ ID NO:151, SEQ ID NO:152, SEQ ID NO:153, SEQ ID NO:154, SEQ ID NO:155, SEQ ID NO:156, SEQ ID NO:157, SEQ ID NO:158, SEQ ID NO:159, SEQ ID NO:160, SEQ ID NO:161, SEQ ID NO:162, SEQ ID NO:163, SEQ ID NO:164, SEQ ID NO:165, SEQ ID NO:166, SEQ ID NO:167, SEQ ID NO:168, SEQ ID NO:169, SEQ ID NO:170, SEQ ID NO:171, SEQ ID NO:172, SEQ ID NO:173, SEQ ID NO:174, SEQ ID NO:175, SEQ ID NO:176, SEQ ID NO:177, SEQ ID NO:178, SEQ ID NO:179, SEQ ID NO:180, SEQ ID NO:181, SEQ ID NO:182, SEQ ID NO:183, SEQ ID NO:184, SEQ ID NO:185, SEQ ID NO:186, SEQ ID NO:187, SEQ ID NO:188, SEQ ID NO:189, SEQ ID NO:190, SEQ ID NO:191, SEQ ID NO:192, SEQ ID NO:193, SEQ ID NO:194, SEQ ID NO:195, SEQ ID NO:196, SEQ ID NO:197, SEQ ID NO:198, SEQ ID NO:199, SEQ ID NO:200, SEQ ID NO:201, SEQ ID NO:202, SEQ ID NO:203, SEQ ID NO:204, SEQ ID NO:205, SEQ ID NO:206, SEQ ID NO:207, SEQ ID NO:208, SEQ ID NO:209, SEQ ID NO:210, SEQ ID NO:211, SEQ ID NO:212, SEQ ID NO:213, SEQ ID NO:214, SEQ ID NO:215, SEQ ID NO:216, SEQ ID NO:217, SEQ ID NO:218, SEQ ID NO:219, SEQ ID NO:220, SEQ ID NO:221, SEQ ID NO:222, SEQ ID NO:223, SEQ ID NO:224, SEQ ID NO:225, SEQ ID NO:226, SEQ ID NO:227, SEQ ID NO:228, SEQ ID NO:229, SEQ ID NO:230, SEQ ID NO:231, SEQ ID NO:232, SEQ ID NO:233, SEQ ID NO:234, SEQ ID NO:235, SEQ ID NO:236, SEQ ID NO:237, SEQ ID NO:238, SEQ ID NO:239, SEQ ID NO:240, SEQ ID NO:241, SEQ ID NO:242, SEQ ID NO:243, SEQ ID NO:244, SEQ ID NO:245, SEQ ID NO:246, SEQ ID NO:247, SEQ ID NO:248, SEQ ID NO:249, SEQ ID NO:250, SEQ ID NO:251, SEQ ID NO:252, SEQ ID NO:253, SEQ ID NO:254, SEQ ID NO:255, SEQ ID NO:256, SEQ ID NO:257, SEQ ID NO:258, SEQ ID NO:259, SEQ ID NO:260, SEQ ID NO:261, SEQ ID NO:262, SEQ ID NO:263, SEQ ID NO:264, SEQ ID NO:265, SEQ ID NO:266, SEQ ID NO:267, SEQ ID NO:268, SEQ ID NO:269, SEQ ID NO:270, SEQ ID NO:271, SEQ ID NO:272, SEQ ID NO:273, SEQ ID NO:274, SEQ ID NO:275, SEQ ID NO:276, SEQ ID NO:277, SEQ ID NO:278, SEQ ID NO:279, SEQ ID NO:280, SEQ ID NO:281, and SEQ ID NO:282.

33. The antibody of claim 32, wherein said antibody is capable of binding an intact Streptococcus pneumoniae cell.

34. (canceled)

35. A recombinant cell transformed or transfected with a polynucleotide comprising a sequence encoding a polypeptide, said polypeptide comprising one of the group consisting of:
a) a sequence selected from the group consisting of SEQ ID NO:1, SEQ ID NO:2, SEQ ID NO:3, SEQ ID NO:4, SEQ ID NO:5, SEQ ID NO:6, SEQ ID NO:7, SEQ ID NO:8, SEQ ID NO:9, SEQ ID NO:10, SEQ ID NO:11, SEQ ID NO:12, SEQ ID NO:13, SEQ ID NO:14, SEQ ID NO:15, SEQ ID NO:16, SEQ ID NO:17, SEQ ID NO:18, SEQ ID NO:19, SEQ ID NO:20, SEQ ID NO:21, SEQ ID NO:22, SEQ ID NO:23, SEQ ID NO:24, SEQ ID NO:25, SEQ ID NO:26, SEQ ID NO:27, SEQ ID NO:28, SEQ ID NO:29, SEQ ID NO:30, SEQ ID NO:31, SEQ ID NO:32, SEQ ID NO:33, SEQ ID NO:34, SEQ ID NO:35, SEQ ID NO:36, SEQ ID NO:37, SEQ ID NO:38, SEQ ID NO:39, SEQ ID NO:40, SEQ ID NO:41, SEQ ID NO:42, SEQ ID NO:43, SEQ ID NO:44, SEQ ID NO:45, SEQ ID NO:46, SEQ ID NO:47, SEQ ID NO:48, SEQ ID NO:49, SEQ ID NO:50, SEQ ID NO:51, SEQ ID NO:52, SEQ ID NO:53, SEQ ID NO:54, SEQ ID NO:55, SEQ ID NO:56, SEQ ID NO:57, SEQ ID NO:58, SEQ ID NO:59, SEQ ID NO:60, SEQ ID NO:61, SEQ ID NO:62, SEQ ID NO:63, SEQ ID NO:64, SEQ ID NO:65, SEQ ID NO:66, SEQ ID NO:67, SEQ ID NO:68, SEQ ID NO:69, SEQ ID NO:70, SEQ ID NO:71, SEQ ID NO:72, SEQ ID NO:73, SEQ ID NO:74, SEQ ID NO:75, SEQ ID NO:76, SEQ ID NO:77, SEQ ID NO:78, SEQ ID NO:79, SEQ ID NO:80, SEQ ID NO:81, SEQ ID NO:82, SEQ ID NO:83, SEQ ID NO:84, SEQ ID NO:85, SEQ ID NO:86, SEQ ID NO:87, SEQ ID NO:88, SEQ ID NO:89, SEQ ID NO:90, SEQ ID NO:91, SEQ ID NO:92, SEQ ID NO:93, SEQ ID NO:94, SEQ ID NO:95, SEQ ID NO:96, SEQ ID NO:97, SEQ ID NO:98, SEQ ID NO:99, SEQ ID NO:100, SEQ ID NO:101, SEQ ID NO:102, SEQ ID NO:103, SEQ ID NO:104, SEQ ID NO:105, SEQ ID NO:106, SEQ ID NO:107, SEQ ID NO:108, SEQ ID NO:109, SEQ ID NO:110, SEQ ID NO:112, SEQ ID NO:113, SEQ ID NO:114, SEQ ID NO:115, SEQ ID NO:116, SEQ ID NO:117, SEQ ID NO:118, SEQ ID NO:119, SEQ ID NO:120, SEQ ID NO:121, SEQ ID NO:122, SEQ ID NO:123, SEQ ID NO:124, SEQ ID NO:125, SEQ ID NO:126, SEQ ID NO:127, SEQ ID NO:128, SEQ ID NO:129, SEQ ID NO:130, SEQ ID NO:131, SEQ ID NO:132, SEQ ID NO:133, SEQ ID NO:134, SEQ ID NO:135, SEQ ID NO:136, SEQ ID NO:137, SEQ ID NO:138, SEQ ID NO:139, SEQ ID NO:140, SEQ ID NO:141, SEQ ID NO:142, SEQ ID NO:143, SEQ ID NO:144, SEQ ID NO:145, SEQ ID NO:146, SEQ ID NO:147, SEQ ID NO:148, SEQ ID NO:149, SEQ ID NO:150, SEQ ID NO:151, SEQ ID NO:152, SEQ ID NO:153, SEQ ID NO:154, SEQ ID NO:155, SEQ ID NO:156, SEQ ID NO:157, SEQ ID NO:158, SEQ ID NO:159, SEQ ID NO:160, SEQ ID NO:161, SEQ ID NO:162, SEQ ID NO:163, SEQ ID NO:164, SEQ ID NO:165, SEQ ID NO:166, SEQ ID NO:167, SEQ ID NO:168, SEQ ID NO:169, SEQ ID NO:170, SEQ ID NO:171, SEQ ID NO:172, SEQ ID NO:173, SEQ ID NO:174, SEQ ID NO:175, SEQ ID NO:176, SEQ ID NO:177, SEQ ID NO:178, SEQ ID NO:179, SEQ ID NO:180, SEQ ID NO:181, SEQ ID NO:182, SEQ ID NO:183, SEQ ID NO:184, SEQ ID NO:185, SEQ ID NO:186, SEQ ID NO:187, SEQ ID NO:188, SEQ ID NO:189, SEQ ID NO:190, SEQ ID NO:191, SEQ ID NO:192, SEQ ID NO:193, SEQ ID NO:194, SEQ ID NO:195, SEQ ID NO:196, SEQ ID NO:197, SEQ ID NO:198, SEQ ID NO:199, SEQ ID NO:200, SEQ ID NO:201, SEQ ID NO:202, SEQ ID NO:203, SEQ ID NO:204, SEQ ID NO:205, SEQ ID NO:206, SEQ ID NO:207, SEQ ID NO:208, SEQ ID NO:209, SEQ ID NO:210, SEQ ID NO:211, SEQ ID NO:212, SEQ ID NO:213, SEQ ID NO:214, SEQ ID NO:215, SEQ ID NO:216, SEQ ID NO:217, SEQ ID NO:218, SEQ ID NO:219, SEQ ID NO:220, SEQ ID NO:221, SEQ ID NO:222, SEQ ID NO:223, SEQ ID NO:224, SEQ ID NO:225, SEQ ID NO:226, SEQ ID NO:227, SEQ ID NO:228, SEQ ID NO:229, SEQ ID NO:230, SEQ ID NO:231, SEQ ID NO:232, SEQ ID NO:233, SEQ ID NO:234, SEQ ID NO:235, SEQ ID NO:236, SEQ ID NO:237, SEQ ID NO:238, SEQ ID NO:239, SEQ ID NO:240, SEQ ID NO:241, SEQ ID NO:242, SEQ ID NO:243, SEQ ID NO:244, SEQ ID NO:245, SEQ ID NO:246, SEQ ID NO:247, SEQ ID NO:248, SEQ ID NO:249, SEQ ID NO:250, SEQ ID NO:251, SEQ ID NO:252, SEQ ID NO:253, SEQ ID NO:254, SEQ ID NO:255, SEQ ID NO:256, SEQ ID NO:257, SEQ ID NO:258, SEQ ID NO:259, SEQ ID NO:260, SEQ ID NO:261, SEQ ID NO:262, SEQ ID NO:263, SEQ ID NO:264, SEQ ID NO:265, SEQ ID NO:266, SEQ ID NO:267, SEQ ID NO:268, SEQ ID NO:269, SEQ ID NO:270, SEQ ID NO:271, SEQ ID NO:272, SEQ ID NO:273, SEQ ID NO:274, SEQ ID NO:275, SEQ ID NO:276, SEQ ID NO:277, SEQ ID NO:278, SEQ ID NO:279, SEQ ID NO:280, SEQ ID NO:281, and SEQ ID NO:282:
b) an antigenic fragment of said sequence; and
c) a variant of said sequence.

36. The recombinant cell of claim 35, wherein the recombinant host cell is selected from the group consisting of an Escherichia coli cell and a Salmonella cell.

37. The recombinant cell of claim 35, wherein said recombinant cell is an attenuated or reduced-virulence cell.

38. A method of immunizing an animal against bacterial infections, comprising administering to the animal a composition comprising a component selected from the group consisting of:
a) a polypeptide which comprises a sequence selected from the group consisting of SEQ ID NO:1, SEQ ID NO:2, SEQ ID NO:3, SEQ ID NO:4, SEQ ID NO:5, SEQ ID NO:6, SEQ ID NO:7, SEQ ID NO:8, SEQ ID NO:9, SEQ ID NO:10, SEQ ID NO:11, SEQ ID NO:12, SEQ ID NO:13, SEQ ID NO:14, SEQ ID NO:15, SEQ ID NO:16, SEQ ID NO:17, SEQ ID NO:18, SEQ ID NO:19, SEQ ID NO:20, SEQ ID NO:21, SEQ ID NO:22, SEQ ID NO:23, SEQ ID NO:24, SEQ ID NO:25, SEQ ID NO:26, SEQ ID NO:27, SEQ ID NO:28, SEQ ID NO:29, SEQ ID NO:30, SEQ ID NO:31, SEQ ID NO:32, SEQ ID NO:33, SEQ ID NO:34, SEQ ID NO:35, SEQ ID NO:36, SEQ ID NO:37, SEQ ID NO:38, SEQ ID NO:39, SEQ ID NO:40, SEQ ID NO:41, SEQ ID NO:42, SEQ ID NO:43, SEQ ID NO:44, SEQ ID NO:45, SEQ ID NO:46, SEQ ID NO:47, SEQ ID NO:48, SEQ ID NO:49, SEQ ID NO:50, SEQ ID NO:51, SEQ ID NO:52, SEQ ID NO:53, SEQ ID NO:54, SEQ ID NO:55, SEQ ID NO:56, SEQ ID NO:57, SEQ ID NO:58, SEQ ID NO:59, SEQ ID NO:60, SEQ ID NO:61, SEQ ID NO:62, SEQ ID NO:63, SEQ ID NO:64, SEQ ID NO:65, SEQ ID NO:66, SEQ ID NO:67, SEQ ID NO:68, SEQ ID NO:69, SEQ ID NO:70, SEQ ID NO:71, SEQ ID NO:72, SEQ ID NO:73, SEQ ID NO:74, SEQ ID NO:75, SEQ ID NO:76, SEQ ID NO:77, SEQ ID NO:78, SEQ ID NO:79, SEQ ID NO:80, SEQ ID NO:81, SEQ ID NO:82, SEQ ID NO:83, SEQ ID NO:84, SEQ ID NO:85, SEQ ID NO:86, SEQ ID NO:87, SEQ ID NO:88, SEQ ID NO:89, SEQ ID NO:90, SEQ ID NO:91, SEQ ID NO:92, SEQ ID NO:93, SEQ ID NO:94, SEQ ID NO:95, SEQ ID NO:96, SEQ ID NO:97, SEQ ID NO:98, SEQ ID NO:99, SEQ ID NO:100, SEQ ID NO:101, SEQ ID NO:102, SEQ ID NO:103, SEQ ID NO:104, SEQ ID NO:105, SEQ ID NO:106, SEQ ID NO:107, SEQ ID NO:108, SEQ ID NO:109, SEQ ID NO:110, SEQ ID NO:112, SEQ ID NO:113, SEQ ID NO:114, SEQ ID NO:115, SEQ ID NO:116, SEQ ID NO:117, SEQ ID NO:118, SEQ ID NO:119, SEQ ID NO:120, SEQ ID NO:121, SEQ ID NO:122, SEQ ID NO:123, SEQ ID NO:124, SEQ ID NO:125, SEQ ID NO:126, SEQ ID NO:127, SEQ ID NO:128, SEQ ID NO:129, SEQ ID NO:130, SEQ ID NO:131, SEQ ID NO:132, SEQ ID NO:133, SEQ ID NO:134, SEQ ID NO:135, SEQ ID NO:136, SEQ ID NO:137, SEQ ID NO:138, SEQ ID NO:139, SEQ ID NO:140, SEQ ID NO:141, SEQ ID NO:142, SEQ ID NO:143, SEQ ID NO:144, SEQ ID NO:145, SEQ ID NO:146, SEQ ID NO:147, SEQ ID NO:148, SEQ ID NO:149, SEQ ID NO:150, SEQ ID NO:151, SEQ ID NO:152, SEQ ID NO:153, SEQ ID NO:154, SEQ ID NO:155, SEQ ID NO:156, SEQ ID NO:157, SEQ ID NO:158, SEQ ID NO:159, SEQ ID NO:160, SEQ ID NO:161, SEQ ID NO:162, SEQ ID NO:163, SEQ ID NO:164, SEQ ID NO:165, SEQ ID NO:166, SEQ ID NO:167, SEQ ID NO:168, SEQ ID NO:169, SEQ ID NO:170, SEQ ID NO:171, SEQ ID NO:172, SEQ ID NO:173, SEQ ID NO:174, SEQ ID NO:175, SEQ ID NO:176, SEQ ID NO:177, SEQ ID NO:178, SEQ ID NO:179, SEQ ID NO:180, SEQ ID NO:181, SEQ ID NO:182, SEQ ID NO:183, SEQ ID NO:184, SEQ ID NO:185, SEQ ID NO:186, SEQ ID NO:187, SEQ ID NO:188, SEQ ID NO:189, SEQ ID NO:190, SEQ ID NO:191, SEQ ID NO:192, SEQ ID NO:193, SEQ ID NO:194, SEQ ID NO:195, SEQ ID NO:196, SEQ ID NO:197, SEQ ID NO:198, SEQ ID NO:199, SEQ ID NO:200, SEQ ID NO:201, SEQ ID NO:202, SEQ ID NO:203, SEQ ID NO:204, SEQ ID NO:205, SEQ ID NO:206, SEQ ID NO:207, SEQ ID NO:208, SEQ ID NO:209, SEQ ID NO:210, SEQ ID NO:211, SEQ ID NO:212, SEQ ID NO:213, SEQ ID NO:214, SEQ ID NO:215, SEQ ID NO:216, SEQ ID NO:217, SEQ ID NO:218, SEQ ID NO:219, SEQ ID NO:220, SEQ ID NO:221, SEQ ID NO:222, SEQ ID NO:223, SEQ ID NO:224, SEQ ID NO:225, SEQ ID NO:226, SEQ ID NO:227, SEQ ID NO:228, SEQ ID NO:229, SEQ ID NO:230, SEQ ID NO:231, SEQ ID NO:232, SEQ ID NO:233, SEQ ID NO:234, SEQ ID NO:235, SEQ ID NO:236, SEQ ID NO:237, SEQ ID NO:238, SEQ ID NO:239, SEQ ID NO:240, SEQ ID NO:241, SEQ ID NO:242, SEQ ID NO:243, SEQ ID NO:244, SEQ ID NO:245, SEQ ID NO:246, SEQ ID NO:247, SEQ ID NO:248, SEQ ID NO:249, SEQ ID NO:250, SEQ ID NO:251, SEQ ID NO:252, SEQ ID NO:253, SEQ ID NO:254, SEQ ID NO:255, SEQ ID NO:256, SEQ ID NO:257, SEQ ID NO:258, SEQ ID NO:259, SEQ ID NO:260, SEQ ID NO:261, SEQ ID NO:262, SEQ ID NO:263, SEQ ID NO:264, SEQ ID NO:265, SEQ ID NO:266, SEQ ID NO:267, SEQ ID NO:268, SEQ ID NO:269, SEQ ID NO:270, SEQ ID NO:271, SEQ ID NO:272, SEQ ID NO:273, SEQ ID NO:274, SEQ ID NO:275, SEQ ID NO:276, SEQ ID NO:277, SEQ ID NO:278, SEQ ID NO:279, SEQ ID NO:280, SEQ ID NO:281, and SEQ ID NO:282,
b) an antigenic fragment of said sequence,
c) a variant of said sequence,
d) a polynucleotide comprising a sequence encoding said polypeptide,
e) an expression vector comprising a sequence encoding said polypeptide, and
f) a recombinant virus or recombinant cell comprising said polynucleotide or said expression vector.

39. The method of claim 38, wherein administration of said composition induces a protective immune response.

40. The method of claim 38, wherein the composition is suitable for parenteral, intravenous, intramuscular, subcutaneous, oral or intranasal administration.

41-45. (canceled)

46. A method for treating or preventing Streptococcus infections in an animal, comprising administering to said animal an antibody capable of binding a polypeptide selected from the group consisting of SEQ ID NO:1, SEQ ID NO:2, SEQ ID NO:3, SEQ ID NO:4, SEQ ID NO:5, SEQ ID NO:6, SEQ ID NO:7, SEQ ID NO:8, SEQ ID NO:9, SEQ ID NO:10, SEQ ID NO:11, SEQ ID NO:12, SEQ ID NO:13, SEQ ID NO:14, SEQ ID NO:15, SEQ ID NO:16, SEQ ID NO:17, SEQ ID NO:18, SEQ ID NO:19, SEQ ID NO:20, SEQ ID NO:21, SEQ ID NO:22, SEQ ID NO:23, SEQ ID NO:24, SEQ ID NO:25, SEQ ID NO:26, SEQ ID NO:27, SEQ ID NO:28, SEQ ID NO:29, SEQ ID NO:30, SEQ ID NO:31, SEQ ID NO:32, SEQ ID NO:33, SEQ ID NO:34, SEQ ID NO:35, SEQ ID NO:36, SEQ ID NO:37, SEQ ID NO:38, SEQ ID NO:39, SEQ ID NO:40, SEQ ID NO:41, SEQ ID NO:42, SEQ ID NO:43, SEQ ID NO:44, SEQ ID NO:45, SEQ ID NO:46, SEQ ID NO:47, SEQ ID NO:48, SEQ ID NO:49, SEQ ID NO:50, SEQ ID NO:51, SEQ ID NO:52, SEQ ID NO:53, SEQ ID NO:54, SEQ ID NO:55, SEQ ID NO:56, SEQ ID NO:57, SEQ ID NO:58, SEQ ID NO:59, SEQ ID NO:60, SEQ ID NO:61, SEQ ID NO:62, SEQ ID NO:63, SEQ ID NO:64, SEQ ID NO:65, SEQ ID NO:66, SEQ ID NO:67, SEQ ID NO:68, SEQ ID NO:69, SEQ ID NO:70, SEQ ID NO:71, SEQ ID NO:72, SEQ ID NO:73, SEQ ID NO:74, SEQ ID NO:75, SEQ ID NO:76, SEQ ID NO:77, SEQ ID NO:78, SEQ ID NO:79, SEQ ID NO:80, SEQ ID NO:81, SEQ ID NO:82, SEQ ID NO:83, SEQ ID NO:84, SEQ ID NO:85, SEQ ID NO:86, SEQ ID NO:87, SEQ ID NO:88, SEQ ID NO:89, SEQ ID NO:90, SEQ ID NO:91, SEQ ID NO:92, SEQ ID NO:93, SEQ ID NO:94, SEQ ID NO:95, SEQ ID NO:96, SEQ ID NO:97, SEQ ID NO:98, SEQ ID NO:99, SEQ ID NO:100, SEQ ID NO:101, SEQ ID NO:102, SEQ ID NO:103, SEQ ID NO:104, SEQ ID NO:105, SEQ ID NO:106, SEQ ID NO:107, SEQ ID NO:108, SEQ ID NO:109, SEQ ID NO:110, SEQ ID NO:112, SEQ ID NO:113, SEQ ID NO:114, SEQ ID NO:115, SEQ ID NO:116, SEQ ID NO:117, SEQ ID NO:118, SEQ ID NO:119, SEQ ID NO:120, SEQ ID NO:121, SEQ ID NO:122, SEQ ID NO:123, SEQ ID NO:124, SEQ ID NO:125, SEQ ID NO:126, SEQ ID NO:127, SEQ ID NO:128, SEQ ID NO:129, SEQ ID NO:130, SEQ ID NO:131, SEQ ID NO:132, SEQ ID NO:133, SEQ ID NO:134, SEQ ID NO:135, SEQ ID NO:136, SEQ ID NO:137, SEQ ID NO:138, SEQ ID NO:139, SEQ ID NO:140, SEQ ID NO:141, SEQ ID NO:142, SEQ ID NO:143, SEQ ID NO:144, SEQ ID NO:145, SEQ ID NO:146, SEQ ID NO:147, SEQ ID NO:148, SEQ ID NO:149, SEQ ID NO:150, SEQ ID NO:151, SEQ ID NO:152, SEQ ID NO:153, SEQ ID NO:154, SEQ ID NO:155, SEQ ID NO:156, SEQ ID NO:157, SEQ ID NO:158, SEQ ID NO:159, SEQ ID NO:160, SEQ ID NO:161, SEQ ID NO:162, SEQ ID NO:163, SEQ ID NO:164, SEQ ID NO:165, SEQ ID NO:166, SEQ ID NO:167, SEQ ID NO:168, SEQ ID NO:169, SEQ ID NO:170, SEQ ID NO:171, SEQ ID NO:172, SEQ ID NO:173, SEQ ID NO:174, SEQ ID NO:175, SEQ ID NO:176, SEQ ID NO:177, SEQ ID NO:178, SEQ ID NO:179, SEQ ID NO:180, SEQ ID NO:181, SEQ ID NO:182, SEQ ID NO:183, SEQ ID NO:184, SEQ ID NO:185, SEQ ID NO:186, SEQ ID NO:187, SEQ ID NO:188, SEQ ID NO:189, SEQ ID NO:190, SEQ ID NO:191, SEQ ID NO:192, SEQ ID NO:193, SEQ ID NO:194, SEQ ID NO:195, SEQ ID NO:196, SEQ ID NO:197, SEQ ID NO:198, SEQ ID NO:199, SEQ ID NO:200, SEQ ID NO:201, SEQ ID NO:202, SEQ ID NO:203, SEQ ID NO:204, SEQ ID NO:205, SEQ ID NO:206, SEQ ID NO:207, SEQ ID NO:208, SEQ ID NO:209, SEQ ID NO:210, SEQ ID NO:211, SEQ ID NO:212, SEQ ID NO:213, SEQ ID NO:214, SEQ ID NO:215, SEQ ID NO:216, SEQ ID NO:217, SEQ ID NO:218, SEQ ID NO:219, SEQ ID NO:220, SEQ ID NO:221, SEQ ID NO:222, SEQ ID NO:223, SEQ ID NO:224, SEQ ID NO:225, SEQ ID NO:226, SEQ ID NO:227, SEQ ID NO:228, SEQ ID NO:229, SEQ ID NO:230, SEQ ID NO:231, SEQ ID NO:232, SEQ ID NO:233, SEQ ID NO:234, SEQ ID NO:235, SEQ ID NO:236, SEQ ID NO:237, SEQ ID NO:238, SEQ ID NO:239, SEQ ID NO:240, SEQ ID NO:241, SEQ ID NO:242, SEQ ID NO:243, SEQ ID NO:244, SEQ ID NO:245, SEQ ID NO:246, SEQ ID NO:247, SEQ ID NO:248, SEQ ID NO:249, SEQ ID NO:250, SEQ ID NO:251, SEQ ID NO:252, SEQ ID NO:253, SEQ ID NO:254, SEQ ID NO:255, SEQ ID NO:256, SEQ ID NO:257, SEQ ID NO:258, SEQ ID NO:259, SEQ ID NO:260, SEQ ID NO:261, SEQ ID NO:262, SEQ ID NO:263, SEQ ID NO:264, SEQ ID NO:265, SEQ ID NO:266, SEQ ID NO:267, SEQ ID NO:268, SEQ ID NO:269, SEQ ID NO:270, SEQ ID NO:271, SEQ ID NO:272, SEQ ID NO:273, SEQ ID NO:274, SEQ ID NO:275, SEQ ID NO:276, SEQ ID NO:277, SEQ ID NO:278, SEQ ID NO:279, SEQ ID NO:280, SEQ ID NO:281, and SEQ ID NO:282.

47. (canceled)

48. A method for raising antibodies to a polypeptide selected from the group consisting of SEQ ID NO:1, SEQ ID NO:2, SEQ ID NO:3, SEQ ID NO:4, SEQ ID NO:5, SEQ ID NO:6, SEQ ID NO:7, SEQ ID NO:8, SEQ ID NO:9, SEQ ID NO:10, SEQ ID NO:11, SEQ ID NO:12, SEQ ID NO:13, SEQ ID NO:14, SEQ ID NO:15, SEQ ID NO:16, SEQ ID NO:17, SEQ ID NO:18, SEQ ID NO:19, SEQ ID NO:20, SEQ ID NO:21, SEQ ID NO:22, SEQ ID NO:23, SEQ ID NO:24, SEQ ID NO:25, SEQ ID NO:26, SEQ ID NO:27, SEQ ID NO:28, SEQ ID NO:29, SEQ ID NO:30, SEQ ID NO:31, SEQ ID NO:32, SEQ ID NO:33, SEQ ID NO:34, SEQ ID NO:35, SEQ ID NO:36, SEQ ID NO:37, SEQ ID NO:38, SEQ ID NO:39, SEQ ID NO:40, SEQ ID NO:41, SEQ ID NO:42, SEQ ID NO:43, SEQ ID NO:44, SEQ ID NO:45, SEQ ID NO:46, SEQ ID NO:47, SEQ ID NO:48, SEQ ID NO:49, SEQ ID NO:50, SEQ ID NO:51, SEQ ID NO:52, SEQ ID NO:53, SEQ ID NO:54, SEQ ID NO:55, SEQ ID NO:56, SEQ ID NO:57, SEQ ID NO:58, SEQ ID NO:59, SEQ ID NO:60, SEQ ID NO:61, SEQ ID NO:62, SEQ ID NO:63, SEQ ID NO:64, SEQ ID NO:65, SEQ ID NO:66, SEQ ID NO:67, SEQ ID NO:68, SEQ ID NO:69, SEQ ID NO:70, SEQ ID NO:71, SEQ ID NO:72, SEQ ID NO:73, SEQ ID NO:74, SEQ ID NO:75, SEQ ID NO:76, SEQ ID NO:77, SEQ ID NO:78, SEQ ID NO:79, SEQ ID NO:80, SEQ ID NO:81, SEQ ID NO:82, SEQ ID NO:83, SEQ ID NO:84, SEQ ID NO:85, SEQ ID NO:86, SEQ ID NO:87, SEQ ID NO:88, SEQ ID NO:89, SEQ ID NO:90, SEQ ID NO:91, SEQ ID NO:92, SEQ ID NO:93, SEQ ID NO:94, SEQ ID NO:95, SEQ ID NO:96, SEQ ID NO:97, SEQ ID NO:98, SEQ ID NO:99, SEQ ID NO:100, SEQ ID NO:101, SEQ ID NO:102, SEQ ID NO:103, SEQ ID NO:104, SEQ ID NO:105, SEQ ID NO:106, SEQ ID NO:107, SEQ ID NO:108, SEQ ID NO:109, SEQ ID NO:110, SEQ ID NO:112, SEQ ID NO:113, SEQ ID NO:114, SEQ ID NO:115, SEQ ID NO:116, SEQ ID NO:117, SEQ ID NO:118, SEQ ID NO:119, SEQ ID NO:120, SEQ ID NO:121, SEQ ID NO:122, SEQ ID NO:123, SEQ ID NO:124, SEQ ID NO:125, SEQ ID NO:126, SEQ ID NO:127, SEQ ID NO:128, SEQ ID NO:129, SEQ ID NO:130, SEQ ID NO:131, SEQ ID NO:132, SEQ ID NO:133, SEQ ID NO:134, SEQ ID NO:135, SEQ ID NO:136, SEQ ID NO:137, SEQ ID NO:138, SEQ ID NO:139, SEQ ID NO:140, SEQ ID NO:141, SEQ ID NO:142, SEQ ID NO:143, SEQ ID NO:144, SEQ ID NO:145, SEQ ID NO:146, SEQ ID NO:147, SEQ ID NO:148, SEQ ID NO:149, SEQ ID NO:150, SEQ ID NO:151, SEQ ID NO:152, SEQ ID NO:153, SEQ ID NO:154, SEQ ID NO:155, SEQ ID NO:156, SEQ ID NO:157, SEQ ID NO:158, SEQ ID NO:159, SEQ ID NO:160, SEQ ID NO:161, SEQ ID NO:162, SEQ ID NO:163, SEQ ID NO:164, SEQ ID NO:165, SEQ ID NO:166, SEQ ID NO:167, SEQ ID NO:168, SEQ ID NO:169, SEQ ID NO:170, SEQ ID NO:171, SEQ ID NO:172, SEQ ID NO:173, SEQ ID NO:174, SEQ ID NO:175, SEQ ID NO:176, SEQ ID NO:177, SEQ ID NO:178, SEQ ID NO:179, SEQ ID NO:180, SEQ ID NO:181, SEQ ID NO:182, SEQ ID NO:183, SEQ ID NO:184, SEQ ID NO:185, SEQ ID NO:186, SEQ ID NO:187, SEQ ID NO:188, SEQ ID NO:189, SEQ ID NO:190, SEQ ID NO:191, SEQ ID NO:192, SEQ ID NO:193, SEQ ID NO:194, SEQ ID NO:195, SEQ ID NO:196, SEQ ID NO:197, SEQ ID NO:198, SEQ ID NO:199, SEQ ID NO:200, SEQ ID NO:201, SEQ ID NO:202, SEQ ID NO:203, SEQ ID NO:204, SEQ ID NO:205, SEQ ID NO:206, SEQ ID NO:207, SEQ ID NO:208, SEQ ID NO:209, SEQ ID NO:210, SEQ ID NO:211, SEQ ID NO:212, SEQ ID NO:213, SEQ ID NO:214, SEQ ID NO:215, SEQ ID NO:216, SEQ ID NO:217, SEQ ID NO:218, SEQ ID NO:219, SEQ ID NO:220, SEQ ID NO:221, SEQ ID NO:222, SEQ ID NO:223, SEQ ID NO:224, SEQ ID NO:225, SEQ ID NO:226, SEQ ID NO:227, SEQ ID NO:228, SEQ ID NO:229, SEQ ID NO:230, SEQ ID NO:231, SEQ ID NO:232, SEQ ID NO:233, SEQ ID NO:234, SEQ ID NO:235, SEQ ID NO:236, SEQ ID NO:237, SEQ ID NO:238, SEQ ID NO:239, SEQ ID NO:240, SEQ ID NO:241, SEQ ID NO:242, SEQ ID NO:243, SEQ ID NO:244, SEQ ID NO:245, SEQ ID NO:246, SEQ ID NO:247, SEQ ID NO:248, SEQ ID NO:249, SEQ ID NO:250, SEQ ID NO:251, SEQ ID NO:252, SEQ ID NO:253, SEQ ID NO:254, SEQ ID NO:255, SEQ ID NO:256, SEQ ID NO:257, SEQ ID NO:258, SEQ ID NO:259, SEQ ID NO:260, SEQ ID NO:261, SEQ ID NO:262, SEQ ID NO:263, SEQ ID NO:264, SEQ ID NO:265, SEQ ID NO:266, SEQ ID NO:267, SEQ ID NO:268, SEQ ID NO:269, SEQ ID NO:270, SEQ ID NO:271, SEQ ID NO:272, SEQ ID NO:273, SEQ ID NO:274, SEQ ID NO:275, SEQ ID NO:276, SEQ ID NO:277, SEQ ID NO:278, SEQ ID NO:279, SEQ ID NO:280, SEQ ID NO:281, and SEQ ID NO:282 in a non-human animal, comprising the steps of
a. introducing into said animal a composition comprising one of the group consisting of:
i) said polypeptide,
ii) an antigenic fragment of said sequence,
iii) a variant of said sequence,
iv) a polynucleotide comprising a sequence encoding said polypeptide,
v) an expression vector comprising a sequence encoding said polypeptide, and
vi) a recombinant virus or recombinant cell comprising said polynucleotide or said expression vector;
b. raising antibodies in said animal, and
c. isolating the antibodies.

49-50. (canceled)

51. A method for detecting Streptococcus pneumoniae or cellular fragments thereof in a sample, comprising the steps of
a. providing an indicator moiety capable of specifically binding a polypeptide selected from the group consisting of SEQ ID NO:1, SEQ ID NO:2, SEQ ID NO:3, SEQ ID NO:4, SEQ ID NO:5, SEQ ID NO:6, SEQ ID NO:7, SEQ ID NO:8, SEQ ID NO:9, SEQ ID NO:10, SEQ ID NO:11, SEQ ID NO:12, SEQ ID NO:13, SEQ ID NO:14, SEQ ID NO:15, SEQ ID NO:16, SEQ ID NO:17, SEQ ID NO:18, SEQ ID NO:19, SEQ ID NO:20, SEQ ID NO:21, SEQ ID NO:22, SEQ ID NO:23, SEQ ID NO:24, SEQ ID NO:25, SEQ ID NO:26, SEQ ID NO:27, SEQ ID NO:28, SEQ ID NO:29, SEQ ID NO:30, SEQ ID NO:31, SEQ ID NO:32, SEQ ID NO:33, SEQ ID NO:34, SEQ ID NO:35, SEQ ID NO:36, SEQ ID NO:37, SEQ ID NO:38, SEQ ID NO:39, SEQ ID NO:40, SEQ ID NO:41, SEQ ID NO:42, SEQ ID NO:43, SEQ ID NO:44, SEQ ID NO:45, SEQ ID NO:46, SEQ ID NO:47, SEQ ID NO:48, SEQ ID NO:49, SEQ ID NO:50, SEQ ID NO:51, SEQ ID NO:52, SEQ ID NO:53, SEQ ID NO:54, SEQ ID NO:55, SEQ ID NO:56, SEQ ID NO:57, SEQ ID NO:58, SEQ ID NO:59, SEQ ID NO:60, SEQ ID NO:61, SEQ ID NO:62, SEQ ID NO:63, SEQ ID NO:64, SEQ ID NO:65, SEQ ID NO:66, SEQ ID NO:67, SEQ ID NO:68, SEQ ID NO:69 SEQ ID NO:70, SEQ ID NO:71, SEQ ID NO:72, SEQ ID NO:73, SEQ ID NO:74, SEQ ID NO:75, SEQ ID NO:76, SEQ ID NO:77, SEQ ID NO:78, SEQ ID NO:79, SEQ ID NO:80, SEQ ID NO:81, SEQ ID NO:82, SEQ ID NO:83, SEQ ID NO:84, SEQ ID NO:85, SEQ ID NO:86, SEQ ID NO:87, SEQ ID NO:88, SEQ ID NO:89, SEQ ID NO:90, SEQ ID NO:91, SEQ ID NO:92, SEQ ID NO:93, SEQ ID NO:94, SEQ ID NO:95, SEQ ID NO:96, SEQ ID NO:97, SEQ ID NO:98, SEQ ID NO:99, SEQ ID NO:100, SEQ ID NO:101, SEQ ID NO:102, SEQ ID NO:103, SEQ ID NO:104, SEQ ID NO:105, SEQ ID NO:106, SEQ ID NO:107, SEQ ID NO:108, SEQ ID NO:109, SEQ ID NO:110, SEQ ID NO:112, SEQ ID NO:113, SEQ ID NO:114, SEQ ID NO:115, SEQ ID NO:116, SEQ ID NO:117, SEQ ID NO:118, SEQ ID NO:119, SEQ ID NO:120, SEQ ID NO:121, SEQ ID NO:122, SEQ ID NO:123, SEQ ID NO:124, SEQ ID NO:125, SEQ ID NO:126, SEQ ID NO:127, SEQ ID NO:128, SEQ ID NO:129, SEQ ID NO:130, SEQ ID NO:131, SEQ ID NO:132, SEQ ID NO:133, SEQ ID NO:134, SEQ ID NO:135, SEQ ID NO:136, SEQ ID NO:137, SEQ ID NO:138, SEQ ID NO:139, SEQ ID NO:140, SEQ ID NO:141, SEQ ID NO:142, SEQ ID NO:143, SEQ ID NO:144, SEQ ID NO:145, SEQ ID NO:146, SEQ ID NO:147, SEQ ID NO:148, SEQ ID NO:149, SEQ ID NO:150, SEQ ID NO:151, SEQ ID NO:152, SEQ ID NO:153, SEQ ID NO:154, SEQ ID NO:155, SEQ ID NO:156, SEQ ID NO:157, SEQ ID NO:158, SEQ ID NO:159, SEQ ID NO:160, SEQ ID NO:161, SEQ ID NO:162, SEQ ID NO:163, SEQ ID NO:164, SEQ ID NO:165, SEQ ID NO:166, SEQ ID NO:167, SEQ ID NO:168, SEQ ID NO:169, SEQ ID NO:170, SEQ ID NO:171, SEQ ID NO:172, SEQ ID NO:173, SEQ ID NO:174, SEQ ID NO:175, SEQ ID NO:176, SEQ ID NO:177, SEQ ID NO:178, SEQ ID NO:179, SEQ ID NO:180, SEQ ID NO:181, SEQ ID NO:182, SEQ ID NO:183, SEQ ID NO:184, SEQ ID NO:185, SEQ ID NO:186, SEQ ID NO:187, SEQ ID NO:188, SEQ ID NO:189, SEQ ID NO:190, SEQ ID NO:191, SEQ ID NO:192, SEQ ID NO:193, SEQ ID NO:194, SEQ ID NO:195, SEQ ID NO:196, SEQ ID NO:197, SEQ ID NO:198, SEQ ID NO:199, SEQ ID NO:200, SEQ ID NO:201, SEQ ID NO:202, SEQ ID NO:203, SEQ ID NO:204, SEQ ID NO:205, SEQ ID NO:206, SEQ ID NO:207, SEQ ID NO:208, SEQ ID NO:209, SEQ ID NO:210, SEQ ID NO:211, SEQ ID NO:212, SEQ ID NO:213, SEQ ID NO:214, SEQ ID NO:215, SEQ ID NO:216, SEQ ID NO:217, SEQ ID NO:218, SEQ ID NO:219, SEQ ID NO:220, SEQ ID NO:221, SEQ ID NO:222, SEQ ID NO:223, SEQ ID NO:224, SEQ ID NO:225, SEQ ID NO:226, SEQ ID NO:227, SEQ ID NO:228, SEQ ID NO:229, SEQ ID NO:230, SEQ ID NO:231, SEQ ID NO:232, SEQ ID NO:233, SEQ ID NO:234, SEQ ID NO:235, SEQ ID NO:236, SEQ ID NO:237, SEQ ID NO:238, SEQ ID NO:239, SEQ ID NO:240, SEQ ID NO:241, SEQ ID NO:242, SEQ ID NO:243, SEQ ID NO:244, SEQ ID NO:245, SEQ ID NO:246, SEQ ID NO:247, SEQ ID NO:248, SEQ ID NO:249, SEQ ID NO:250, SEQ ID NO:251, SEQ ID NO:252, SEQ ID NO:253, SEQ ID NO:254, SEQ ID NO:255, SEQ ID NO:256, SEQ ID NO:257, SEQ ID NO:258, SEQ ID NO:259, SEQ ID NO:260, SEQ ID NO:261, SEQ ID NO:262, SEQ ID NO:263, SEQ ID NO:264, SEQ ID NO:265, SEQ ID NO:266, SEQ ID NO:267, SEQ ID NO:268, SEQ ID NO:269, SEQ ID NO:270, SEQ ID NO:271, SEQ ID NO:272, SEQ ID NO:273, SEQ ID NO:274, SEQ ID NO:275, SEQ ID NO:276, SEQ ID NO:277, SEQ ID NO:278, SEQ ID NO:279, SEQ ID NO:280, SEQ ID NO:281, and SEQ ID NO:282,
b. contacting said sample with said indicator moiety; and
c. determining whether a signal has been generated by the indicator moiety, thereby detecting whether said sample contains Streptococcus pneumoniae or cellular fragments thereof.

52. The method of claim 51, wherein the indicator moiety is capable of binding an intact Streptococcus pneumoniae cell.

53. The method of claim 51, wherein said indicator moiety does not pass through the membrane of a Streptococcus pneumoniae cell.

54. The method of claim 51 to 53, wherein said indicator moiety comprises an antibody.

55. A method for detecting Streptococcus pneumoniae or cellular fragments thereof in a sample comprising the step of analyzing said sample by mass spectrometry to detect the presence of a polypeptide selected from the group consisting of SEQ ID NO:1, SEQ ID NO:2, SEQ ID NO:3, SEQ ID NO:4, SEQ ID NO:5, SEQ ID NO:6, SEQ ID NO:7, SEQ ID NO:8, SEQ ID NO:9, SEQ ID NO:10, SEQ ID NO:11, SEQ ID NO:12, SEQ ID NO:13, SEQ ID NO:14, SEQ ID NO:15, SEQ ID NO:16, SEQ ID NO:17, SEQ ID NO:18, SEQ ID NO:19, SEQ ID NO:20, SEQ ID NO:21, SEQ ID NO:22, SEQ ID NO:23, SEQ ID NO:24, SEQ ID NO:25, SEQ ID NO:26, SEQ ID NO:27, SEQ ID NO:28, SEQ ID NO:29, SEQ ID NO:30, SEQ ID NO:31, SEQ ID NO:32, SEQ ID NO:33, SEQ ID NO:34, SEQ ID NO:35, SEQ ID NO:36, SEQ ID NO:37, SEQ ID NO:38, SEQ ID NO:39, SEQ ID NO:40, SEQ ID NO:41, SEQ ID NO:42, SEQ ID NO:43, SEQ ID NO:44, SEQ ID NO:45, SEQ ID NO:46, SEQ ID NO:47, SEQ ID NO:48, SEQ ID NO:49, SEQ ID NO:50, SEQ ID NO:51, SEQ ID NO:52, SEQ ID NO:53, SEQ ID NO:54, SEQ ID NO:55, SEQ ID NO:56, SEQ ID NO:57, SEQ ID NO:58, SEQ ID NO:59, SEQ ID NO:60, SEQ ID NO:61, SEQ ID NO:62, SEQ ID NO:63, SEQ ID NO:64, SEQ ID NO:65, SEQ ID NO:66, SEQ ID NO:67, SEQ ID NO:68, SEQ ID NO:69, SEQ ID NO:70, SEQ ID NO:71, SEQ ID NO:72, SEQ ID NO:73, SEQ ID NO:74, SEQ ID NO:75, SEQ ID NO:76, SEQ ID NO:77, SEQ ID NO:78, SEQ ID NO:79, SEQ ID NO:80, SEQ ID NO:81, SEQ ID NO:82, SEQ ID NO:83, SEQ ID NO:84, SEQ ID NO:85, SEQ ID NO:86, SEQ ID NO:87, SEQ ID NO:88, SEQ ID NO:89, SEQ ID NO:90, SEQ ID NO:91, SEQ ID NO:92, SEQ ID NO:93, SEQ ID NO:94, SEQ ID NO:95, SEQ ID NO:96, SEQ ID NO:97, SEQ ID NO:98, SEQ ID NO:99, SEQ ID NO:100, SEQ ID NO:101, SEQ ID NO:102, SEQ ID NO:103, SEQ ID NO:104, SEQ ID NO:105, SEQ ID NO:106, SEQ ID NO:107, SEQ ID NO:108, SEQ ID NO:109, SEQ ID NO:110, SEQ ID NO:112, SEQ ID NO:113, SEQ ID NO:114, SEQ ID NO:115, SEQ ID NO:116, SEQ ID NO:117, SEQ ID NO:118, SEQ ID NO:119, SEQ ID NO:120, SEQ ID NO:121, SEQ ID NO:122, SEQ ID NO:123, SEQ ID NO:124, SEQ ID NO:125, SEQ ID NO:126, SEQ ID NO:127, SEQ ID NO:128, SEQ ID NO:129, SEQ ID NO:130, SEQ ID NO:131, SEQ ID NO:132, SEQ ID NO:133, SEQ ID NO:134, SEQ ID NO:135, SEQ ID NO:136, SEQ ID NO:137, SEQ ID NO:138, SEQ ID NO:139, SEQ ID NO:140, SEQ ID NO:141, SEQ ID NO:142, SEQ ID NO:143, SEQ ID NO:144, SEQ ID NO:145, SEQ ID NO:146, SEQ ID NO:147, SEQ ID NO:148, SEQ ID NO:149, SEQ ID NO:150, SEQ ID NO:151, SEQ ID NO:152, SEQ ID NO:153, SEQ ID NO:154, SEQ ID NO:155, SEQ ID NO:156, SEQ ID NO:157, SEQ ID NO:158, SEQ ID NO:159, SEQ ID NO:160, SEQ ID NO:161, SEQ ID NO:162, SEQ ID NO:163, SEQ ID NO:164, SEQ ID NO:165, SEQ ID NO:166, SEQ ID NO:167, SEQ ID NO:168, SEQ ID NO:169, SEQ ID NO:170, SEQ ID NO:171, SEQ ID NO:172, SEQ ID NO:173, SEQ ID NO:174, SEQ ID NO:175, SEQ ID NO:176, SEQ ID NO:177, SEQ ID NO:178, SEQ ID NO:179, SEQ ID NO:180, SEQ ID NO:181, SEQ ID NO:182, SEQ ID NO:183, SEQ ID NO:184, SEQ ID NO:185, SEQ ID NO:186, SEQ ID NO:187, SEQ ID NO:188, SEQ ID NO:189, SEQ ID NO:190, SEQ ID NO:191, SEQ ID NO:192, SEQ ID NO:193, SEQ ID NO:194, SEQ ID NO:195, SEQ ID NO:196, SEQ ID NO:197, SEQ ID NO:198, SEQ ID NO:199, SEQ ID NO:200, SEQ ID NO:201, SEQ ID NO:202, SEQ ID NO:203, SEQ ID NO:204, SEQ ID NO:205, SEQ ID NO:206, SEQ ID NO:207, SEQ ID NO:208, SEQ ID NO:209, SEQ ID NO:210, SEQ ID NO:211, SEQ ID NO:212, SEQ ID NO:213, SEQ ID NO:214, SEQ ID NO:215, SEQ ID NO:216, SEQ ID NO:217, SEQ ID NO:218, SEQ ID NO:219, SEQ ID NO:220, SEQ ID NO:221, SEQ ID NO:222, SEQ ID NO:223, SEQ ID NO:224, SEQ ID NO:225, SEQ ID NO:226, SEQ ID NO:227, SEQ ID NO:228, SEQ ID NO:229, SEQ ID NO:230, SEQ ID NO:231, SEQ ID NO:232, SEQ ID NO:233, SEQ ID NO:234, SEQ ID NO:235, SEQ ID NO:236, SEQ ID NO:237, SEQ ID NO:238, SEQ ID NO:239, SEQ ID NO:240, SEQ ID NO:241, SEQ ID NO:242, SEQ ID NO:243, SEQ ID NO:244, SEQ ID NO:245, SEQ ID NO:246, SEQ ID NO:247, SEQ ID NO:248, SEQ ID NO:249, SEQ ID NO:250, SEQ ID NO:251, SEQ ID NO:252, SEQ ID NO:253, SEQ ID NO:254, SEQ ID NO:255, SEQ ID NO:256, SEQ ID NO:257, SEQ ID NO:258, SEQ ID NO:259, SEQ ID NO:260, SEQ ID NO:261, SEQ ID NO:262, SEQ ID NO:263, SEQ ID NO:264, SEQ ID NO:265, SEQ ID NO:266, SEQ ID NO:267, SEQ ID NO:268, SEQ ID NO:269, SEQ ID NO:270, SEQ ID NO:271, SEQ ID NO:272, SEQ ID NO:273, SEQ ID NO:274, SEQ ID NO:275, SEQ ID NO:276, SEQ ID NO:277, SEQ ID NO:278, SEQ ID NO:279, SEQ ID NO:280, SEQ ID NO:281, and SEQ ID NO:282.

56. A method for identifying a binding partner of a polypeptide selected from the group consisting of SEQ ID NO:1, SEQ ID NO:2, SEQ ID NO:3, SEQ ID NO:4, SEQ ID NO:5, SEQ ID NO:6, SEQ ID NO:7, SEQ ID NO:8, SEQ ID NO:9, SEQ ID NO:10, SEQ ID NO:11, SEQ ID NO:12, SEQ ID NO:13, SEQ ID NO:14, SEQ ID NO:15, SEQ ID NO:16, SEQ ID NO:17, SEQ ID NO:18, SEQ ID NO:19, SEQ ID NO:20, SEQ ID NO:21, SEQ ID NO:22, SEQ ID NO:23, SEQ ID NO:24, SEQ ID NO:25, SEQ ID NO:26, SEQ ID NO:27, SEQ ID NO:28, SEQ ID NO:29, SEQ ID NO:30, SEQ ID NO:31, SEQ ID NO:32, SEQ ID NO:33, SEQ ID NO:34, SEQ ID NO:35, SEQ ID NO:36, SEQ ID NO:37, SEQ ID NO:38, SEQ ID NO:39, SEQ ID NO:40, SEQ ID NO:41, SEQ ID NO:42, SEQ ID NO:43, SEQ ID NO:44, SEQ ID NO:45, SEQ ID NO:46, SEQ ID NO:47, SEQ ID NO:48, SEQ ID NO:49, SEQ ID NO:50, SEQ ID NO:51, SEQ ID NO:52, SEQ ID NO:53, SEQ ID NO:54, SEQ ID NO:55, SEQ ID NO:56, SEQ ID NO:57, SEQ ID NO:58, SEQ ID NO:59, SEQ ID NO:60, SEQ ID NO:61, SEQ ID NO:62, SEQ ID NO:63, SEQ ID NO:64, SEQ ID NO:65, SEQ ID NO:66, SEQ ID NO:67, SEQ ID NO:68, SEQ ID NO:69, SEQ ID NO:70, SEQ ID NO:71, SEQ ID NO:72, SEQ ID NO:73, SEQ ID NO:74, SEQ ID NO:75, SEQ ID NO:76, SEQ ID NO:77, SEQ ID NO:78, SEQ ID NO:79, SEQ ID NO:80, SEQ ID NO:81, SEQ ID NO:82, SEQ ID NO:83, SEQ ID NO:84, SEQ ID NO:85, SEQ ID NO:86, SEQ ID NO:87, SEQ ID NO:88, SEQ ID NO:89, SEQ ID NO:90, SEQ ID NO:91, SEQ ID NO:92, SEQ ID NO:93, SEQ ID NO:94, SEQ ID NO:95, SEQ ID NO:96, SEQ ID NO:97, SEQ ID NO:98, SEQ ID NO:99, SEQ ID NO:100, SEQ ID NO:101, SEQ ID NO:102, SEQ ID NO:103, SEQ ID NO:104, SEQ ID NO:105, SEQ ID NO:106, SEQ ID NO:107, SEQ ID NO:108, SEQ ID NO:109, SEQ ID NO:110, SEQ ID NO:112, SEQ ID NO:113, SEQ ID NO:114, SEQ ID NO:115, SEQ ID NO:116, SEQ ID NO:117, SEQ ID NO:118, SEQ ID NO:119, SEQ ID NO:120, SEQ ID NO:121, SEQ ID NO:122, SEQ ID NO:123, SEQ ID NO:124, SEQ ID NO:125, SEQ ID NO:126, SEQ ID NO:127, SEQ ID NO:128, SEQ ID NO:129, SEQ ID NO:130, SEQ ID NO:131, SEQ ID NO:132, SEQ ID NO:133, SEQ ID NO:134, SEQ ID NO:135, SEQ ID NO:136, SEQ ID NO:137, SEQ ID NO:138, SEQ ID NO:139, SEQ ID NO:140, SEQ ID NO:141, SEQ ID NO:142, SEQ ID NO:143, SEQ ID NO:144, SEQ ID NO:145, SEQ ID NO:146, SEQ ID NO:147, SEQ ID NO:148, SEQ ID NO:149, SEQ ID NO:150, SEQ ID NO:151, SEQ ID NO:152, SEQ ID NO:153, SEQ ID NO:154, SEQ ID NO:155, SEQ ID NO:156, SEQ ID NO:157, SEQ ID NO:158, SEQ ID NO:159, SEQ ID NO:160, SEQ ID NO:161, SEQ ID NO:162, SEQ ID NO:163, SEQ ID NO:164, SEQ ID NO:165, SEQ ID NO:166, SEQ ID NO:167, SEQ ID NO:168, SEQ ID NO:169, SEQ ID NO:170, SEQ ID NO:171, SEQ ID NO:172, SEQ ID NO:173, SEQ ID NO:174, SEQ ID NO:175, SEQ ID NO:176, SEQ ID NO:177, SEQ ID NO:178, SEQ ID NO:179, SEQ ID NO:180, SEQ ID NO:181, SEQ ID NO:182, SEQ ID NO:183, SEQ ID NO:184, SEQ ID NO:185, SEQ ID NO:186, SEQ ID NO:187, SEQ ID NO:188, SEQ ID NO:189, SEQ ID NO:190, SEQ ID NO:191, SEQ ID NO:192, SEQ ID NO:193, SEQ ID NO:194, SEQ ID NO:195, SEQ ID NO:196, SEQ ID NO:197, SEQ ID NO:198, SEQ ID NO:199, SEQ ID NO:200, SEQ ID NO:201, SEQ ID NO:202, SEQ ID NO:203, SEQ ID NO:204, SEQ ID NO:205, SEQ ID NO:206, SEQ ID NO:207, SEQ ID NO:208, SEQ ID NO:209, SEQ ID NO:210, SEQ ID NO:211, SEQ ID NO:212, SEQ ID NO:213, SEQ ID NO:214, SEQ ID NO:215, SEQ ID NO:216, SEQ ID NO:217, SEQ ID NO:218, SEQ ID NO:219, SEQ ID NO:220, SEQ ID NO:221, SEQ ID NO:222, SEQ ID NO:223, SEQ ID NO:224, SEQ ID NO:225, SEQ ID NO:226, SEQ ID NO:227, SEQ ID NO:228, SEQ ID NO:229, SEQ ID NO:230, SEQ ID NO:231, SEQ ID NO:232, SEQ ID NO:233, SEQ ID NO:234, SEQ ID NO:235, SEQ ID NO:236, SEQ ID NO:237, SEQ ID NO:238, SEQ ID NO:239, SEQ ID NO:240, SEQ ID NO:241, SEQ ID NO:242, SEQ ID NO:243, SEQ ID NO:244, SEQ ID NO:245, SEQ ID NO:246, SEQ ID NO:247, SEQ ID NO:248, SEQ ID NO:249, SEQ ID NO:250, SEQ ID NO:251, SEQ ID NO:252, SEQ ID NO:253, SEQ ID NO:254, SEQ ID NO:255, SEQ ID NO:256, SEQ ID NO:257, SEQ ID NO:258, SEQ ID NO:259, SEQ ID NO:260, SEQ ID NO:261, SEQ ID NO:262, SEQ ID NO:263, SEQ ID NO:264, SEQ ID NO:265, SEQ ID NO:266, SEQ ID NO:267, SEQ ID NO:268, SEQ ID NO:269, SEQ ID NO:270, SEQ ID NO:271, SEQ ID NO:272, SEQ ID NO:273, SEQ ID NO:274, SEQ ID NO:275, SEQ ID NO:276, SEQ ID NO:277, SEQ ID NO:278, SEQ ID NO:279, SEQ ID NO:280, SEQ ID NO:281, SEQ ID NO:282, and a fragment of any of SEQ ID NOS: 1-282, comprising the steps of
a. providing said polypeptide;
b. contacting said polypeptide with a putative binding partner, and
c. determining whether said putative binding partner is capable of binding to said polypeptide or fragment.

57. A method for identifying a compound with antibacterial activity against Streptococcus pneumoniae, comprising the steps of
a. providing a sensitized cell having a reduced level of a polypeptide selected from the group consisting of SEQ ID NO:1-282, preferably selected from the group consisting of SEQ ID NO:1, SEQ ID NO:2, SEQ ID NO:3, SEQ ID NO:4, SEQ ID NO:5, SEQ ID NO:6, SEQ ID NO:7, SEQ ID NO:8, SEQ ID NO:9, SEQ ID NO:10, SEQ ID NO:11, SEQ ID NO:12, SEQ ID NO:13, SEQ ID NO:14, SEQ ID NO:15, SEQ ID NO:16, SEQ ID NO:17, SEQ ID NO:18, SEQ ID NO:19, SEQ ID NO:20, SEQ ID NO:21, SEQ ID NO:22, SEQ ID NO:23, SEQ ID NO:24, SEQ ID NO:25, SEQ ID NO:26, SEQ ID NO:27, SEQ ID NO:28, SEQ ID NO:29, SEQ ID NO:30, SEQ ID NO:31, SEQ ID NO:32, SEQ ID NO:33, SEQ ID NO:34, SEQ ID NO:35, SEQ ID NO:36, SEQ ID NO:37, SEQ ID NO:38, SEQ ID NO:39, SEQ ID NO:40, SEQ ID NO:41, SEQ ID NO:42, SEQ ID NO:43, SEQ ID NO:44, SEQ ID NO:45, SEQ ID NO:46, SEQ ID NO:47, SEQ ID NO:48, SEQ ID NO:49, SEQ ID NO:50, SEQ ID NO:51, SEQ ID NO:52, SEQ ID NO:53, SEQ ID NO:54, SEQ ID NO:55, SEQ ID NO:56, SEQ ID NO:57, SEQ ID NO:58, SEQ ID NO:59, SEQ ID NO:60, SEQ ID NO:61, SEQ ID NO:62, SEQ ID NO:63, SEQ ID NO:64, SEQ ID NO:65, SEQ ID NO:66, SEQ ID NO:67, SEQ ID NO:68, SEQ ID NO:69, SEQ ID NO:70, SEQ ID NO:71, SEQ ID NO:72, SEQ ID NO:73, SEQ ID NO:74, SEQ ID NO:75, SEQ ID NO:76, SEQ ID NO:77, SEQ ID NO:78, SEQ ID NO:79, SEQ ID NO:80, SEQ ID NO:81, SEQ ID NO:82, SEQ ID NO:83, SEQ ID NO:84, SEQ ID NO:85, SEQ ID NO:86, SEQ ID NO:87, SEQ ID NO:88, SEQ ID NO:89, SEQ ID NO:90, SEQ ID NO:91, SEQ ID NO:92, SEQ ID NO:93, SEQ ID NO:94, SEQ ID NO:95, SEQ ID NO:96, SEQ ID NO:97, SEQ ID NO:98, SEQ ID NO:99, SEQ ID NO:100, SEQ ID NO:101, SEQ ID NO:102, SEQ ID NO:103, SEQ ID NO:104, SEQ ID NO:105, SEQ ID NO:106, SEQ ID NO:107, SEQ ID NO:108, SEQ ID NO:109, SEQ ID NO:110, SEQ ID NO:112, SEQ ID NO:113, SEQ ID NO:114, SEQ ID NO:115, SEQ ID NO:116, SEQ ID NO:117, SEQ ID NO:118, SEQ ID NO:119, SEQ ID NO:120, SEQ ID NO:121, SEQ ID NO:122, SEQ ID NO:123, SEQ ID NO:124, SEQ ID NO:125, SEQ ID NO:126, SEQ ID NO:127, SEQ ID NO:128, SEQ ID NO:129, SEQ ID NO:130, SEQ ID NO:131, SEQ ID NO:132, SEQ ID NO:133, SEQ ID NO:134, SEQ ID NO:135, SEQ ID NO:136, SEQ ID NO:137, SEQ ID NO:138, SEQ ID NO:139, SEQ ID NO:140, SEQ ID NO:141, SEQ ID NO:142, SEQ ID NO:143, SEQ ID NO:144, SEQ ID NO:145, SEQ ID NO:146, SEQ ID NO:147, SEQ ID NO:148, SEQ ID NO:149, SEQ ID NO:150, SEQ ID NO:151, SEQ ID NO:152, SEQ ID NO:153, SEQ ID NO:154, SEQ ID NO:155, SEQ ID NO:156, SEQ ID NO:157, SEQ ID NO:158, SEQ ID NO:159, SEQ ID NO:160, SEQ ID NO:161, SEQ ID NO:162, SEQ ID NO:163, SEQ ID NO:164, SEQ ID NO:165, SEQ ID NO:166, SEQ ID NO:167, SEQ ID NO:168, SEQ ID NO:169, SEQ ID NO:170, SEQ ID NO:171, SEQ ID NO:172, SEQ ID NO:173, SEQ ID NO:174, SEQ ID NO:175, SEQ ID NO:176, SEQ ID NO:177, SEQ ID NO:178, SEQ ID NO:179, SEQ ID NO:180, SEQ ID NO:181, SEQ ID NO:182, SEQ ID NO:183, SEQ ID NO:184, SEQ ID NO:185, SEQ ID NO:186, SEQ ID NO:187, SEQ ID NO:188, SEQ ID NO:189, SEQ ID NO:190, SEQ ID NO:191, SEQ ID NO:192, SEQ ID NO:193, SEQ ID NO:194, SEQ ID NO:195, SEQ ID NO:196, SEQ ID NO:197, SEQ ID NO:198, SEQ ID NO:199, SEQ ID NO:200, SEQ ID NO:201, SEQ ID NO:202, SEQ ID NO:203, SEQ ID NO:204, SEQ ID NO:205, SEQ ID NO:206, SEQ ID NO:207, SEQ ID NO:208, SEQ ID NO:209, SEQ ID NO:210, SEQ ID NO:211, SEQ ID NO:212, SEQ ID NO:213, SEQ ID NO:214, SEQ ID NO:215, SEQ ID NO:216, SEQ ID NO:217, SEQ ID NO:218, SEQ ID NO:219, SEQ ID NO:220, SEQ ID NO:221, SEQ ID NO:222, SEQ ID NO:223, SEQ ID NO:224, SEQ ID NO:225, SEQ ID NO:226, SEQ ID NO:227, SEQ ID NO:228, SEQ ID NO:229, SEQ ID NO:230, SEQ ID NO:231, SEQ ID NO:232, SEQ ID NO:233, SEQ ID NO:234, SEQ ID NO:235, SEQ ID NO:236, SEQ ID NO:237, SEQ ID NO:238, SEQ ID NO:239, SEQ ID NO:240, SEQ ID NO:241, SEQ ID NO:242, SEQ ID NO:243, SEQ ID NO:244, SEQ ID NO:245, SEQ ID NO:246, SEQ ID NO:247, SEQ ID NO:248, SEQ ID NO:249, SEQ ID NO:250, SEQ ID NO:251, SEQ ID NO:252, SEQ ID NO:253, SEQ ID NO:254, SEQ ID NO:255, SEQ ID NO:256, SEQ ID NO:257, SEQ ID NO:258, SEQ ID NO:259, SEQ ID NO:260, SEQ ID NO:261, SEQ ID NO:262, SEQ ID NO:263, SEQ ID NO:264, SEQ ID NO:265, SEQ ID NO:266, SEQ ID NO:267, SEQ ID NO:268, SEQ ID NO:269, SEQ ID NO:270, SEQ ID NO:271, SEQ ID NO:272, SEQ ID NO:273, SEQ ID NO:274, SEQ ID NO:275, SEQ ID NO:276, SEQ ID NO:277, SEQ ID NO:278, SEQ ID NO:279, SEQ ID NO:280, SEQ ID NO:281, and SEQ ID NO:282, and
b. determining the sensitivity of said cell to a putative antibacterial compound.

58. A method for identifying an inhibitor of a polypeptide selected from the group consisting of SEQ ID NO:1, SEQ ID NO:2, SEQ ID NO:3, SEQ ID NO:4, SEQ ID NO:5, SEQ ID NO:6, SEQ ID NO:7, SEQ ID NO:8, SEQ ID NO:9, SEQ ID NO:10, SEQ ID NO:11, SEQ ID NO:12, SEQ ID NO:13, SEQ ID NO:14, SEQ ID NO:15, SEQ ID NO:16, SEQ ID NO:17, SEQ ID NO:18, SEQ ID NO:19, SEQ ID NO:20, SEQ ID NO:21, SEQ ID NO:22, SEQ ID NO:23, SEQ ID NO:24, SEQ ID NO:25, SEQ ID NO:26, SEQ ID NO:27, SEQ ID NO:28, SEQ ID NO:29, SEQ ID NO:30, SEQ ID NO:31, SEQ ID NO:32, SEQ ID NO:33, SEQ ID NO:34, SEQ ID NO:35, SEQ ID NO:36, SEQ ID NO:37, SEQ ID NO:38, SEQ ID NO:39, SEQ ID NO:40, SEQ ID NO:41, SEQ ID NO:42, SEQ ID NO:43, SEQ ID NO:44, SEQ ID NO:45, SEQ ID NO:46, SEQ ID NO:47, SEQ ID NO:48, SEQ ID NO:49, SEQ ID NO:50, SEQ ID NO:51, SEQ ID NO:52, SEQ ID NO:53, SEQ ID NO:54, SEQ ID NO:55, SEQ ID NO:56, SEQ ID NO:57, SEQ ID NO:58, SEQ ID NO:59, SEQ ID NO:60, SEQ ID NO:61, SEQ ID NO:62, SEQ ID NO:63, SEQ ID NO:64, SEQ ID NO:65, SEQ ID NO:66, SEQ ID NO:67, SEQ ID NO:68, SEQ ID NO:69, SEQ ID NO:70, SEQ ID NO:71, SEQ ID NO:72, SEQ ID NO:73, SEQ ID NO:74, SEQ ID NO:75, SEQ ID NO:76, SEQ ID NO:77, SEQ ID NO:78, SEQ ID NO:79, SEQ ID NO:80, SEQ ID NO:81, SEQ ID NO:82, SEQ ID NO:83, SEQ ID NO:84, SEQ ID NO:85, SEQ ID NO:86, SEQ ID NO:87, SEQ ID NO:88, SEQ ID NO:89, SEQ ID NO:90, SEQ ID NO:91, SEQ ID NO:92, SEQ ID NO:93, SEQ ID NO:94, SEQ ID NO:95, SEQ ID NO:96, SEQ ID NO:97, SEQ ID NO:98, SEQ ID NO:99, SEQ ID NO:100, SEQ ID NO:101, SEQ ID NO:102, SEQ ID NO:103, SEQ ID NO:104, SEQ ID NO:105, SEQ ID NO:106, SEQ ID NO:107, SEQ ID NO:108, SEQ ID NO:109, SEQ ID NO:10, SEQ ID NO:112, SEQ ID NO:113, SEQ ID NO:114, SEQ ID NO:115, SEQ ID NO:116, SEQ ID NO:117, SEQ ID NO:118, SEQ ID NO:119, SEQ ID NO:120, SEQ ID NO:121, SEQ ID NO:122, SEQ ID NO:123, SEQ ID NO:124, SEQ ID NO:125, SEQ ID NO:126, SEQ ID NO:127, SEQ ID NO:128, SEQ ID NO:129, SEQ ID NO:130, SEQ ID NO:131, SEQ ID NO:132, SEQ ID NO:133, SEQ ID NO:134, SEQ ID NO:135, SEQ ID NO:136, SEQ ID NO:137, SEQ ID NO:138, SEQ ID NO:139, SEQ ID NO:140, SEQ ID NO:141, SEQ ID NO:142, SEQ ID NO:143, SEQ ID NO:144, SEQ ID NO:145, SEQ ID NO:146, SEQ ID NO:147, SEQ ID NO:148, SEQ ID NO:149, SEQ ID NO:150, SEQ ID NO:151, SEQ ID NO:152, SEQ ID NO:153, SEQ ID NO:154, SEQ ID NO:155, SEQ ID NO:156, SEQ ID NO:157, SEQ ID NO:158, SEQ ID NO:159, SEQ ID NO:160, SEQ ID NO:161, SEQ ID NO:162, SEQ ID NO:163, SEQ ID NO:164, SEQ ID NO:165, SEQ ID NO:166, SEQ ID NO:167, SEQ ID NO:168, SEQ ID NO:169, SEQ ID NO:170, SEQ ID NO:171, SEQ ID NO:172, SEQ ID NO:173, SEQ ID NO:174, SEQ ID NO:175, SEQ ID NO:176, SEQ ID NO:177, SEQ ID NO:178, SEQ ID NO:179, SEQ ID NO:180, SEQ ID NO:181, SEQ ID NO:182, SEQ ID NO:183, SEQ ID NO:184, SEQ ID NO:185, SEQ ID NO:186, SEQ ID NO:187, SEQ ID NO:188, SEQ ID NO:189, SEQ ID NO:190, SEQ ID NO:191, SEQ ID NO:192, SEQ ID NO:193, SEQ ID NO:194, SEQ ID NO:195, SEQ ID NO:196, SEQ ID NO:197, SEQ ID NO:198, SEQ ID NO:199, SEQ ID NO:200, SEQ ID NO:201, SEQ ID NO:202, SEQ ID NO:203, SEQ ID NO:204, SEQ ID NO:205, SEQ ID NO:206, SEQ ID NO:207, SEQ ID NO:208, SEQ ID NO:209, SEQ ID NO:21, SEQ ID NO:211, SEQ ID NO:212, SEQ ID NO:213, SEQ ID NO:214, SEQ ID NO:215, SEQ ID NO:216, SEQ ID NO:217, SEQ ID NO:218, SEQ ID NO:219, SEQ ID NO:220, SEQ ID NO:221, SEQ ID NO:222, SEQ ID NO:223, SEQ ID NO:224, SEQ ID NO:225, SEQ ID NO:226, SEQ ID NO:227, SEQ ID NO:228, SEQ ID NO:229, SEQ ID NO:230, SEQ ID NO:231, SEQ ID NO:232, SEQ ID NO:233, SEQ ID NO:234, SEQ ID NO:235, SEQ ID NO:236, SEQ ID NO:237, SEQ ID NO:238, SEQ ID NO:239, SEQ ID NO:240, SEQ ID NO:241, SEQ ID NO:242, SEQ ID NO:243, SEQ ID NO:244, SEQ ID NO:245, SEQ ID NO:246, SEQ ID NO:247, SEQ ID NO:248, SEQ ID NO:249, SEQ ID NO:250, SEQ ID NO:251, SEQ ID NO:252, SEQ ID NO:253, SEQ ID NO:254, SEQ ID NO:255, SEQ ID NO:256, SEQ ID NO:257, SEQ ID NO:258, SEQ ID NO:259, SEQ ID NO:260, SEQ ID NO:261, SEQ ID NO:262, SEQ ID NO:263, SEQ ID NO:264, SEQ ID NO:265, SEQ ID NO:266, SEQ ID NO:267, SEQ ID NO:268, SEQ ID NO:269, SEQ ID NO:270, SEQ ID NO:271, SEQ ID NO:272, SEQ ID NO:273, SEQ ID NO:274, SEQ ID NO:275, SEQ ID NO:276, SEQ ID NO:277, SEQ ID NO:278, SEQ ID NO:279, SEQ ID NO:280, SEQ ID NO:281, and SEQ ID NO:282, comprising the steps of
a. providing two cells that differ in the level of said polypeptide
b. determining the sensitivity of said cells to a putative inhibitor; and
c. ascertaining whether said two cells are differently affected by the presence of said putative inhibitor.

59. The method of claim 58, wherein the putative inhibitor does not pass through the membrane of a Streptococcus pneumoniae cell.

60. The method of claim 58, wherein the determining step comprises a growth assay.

61. The antibody of claim 32, wherein said antibody is polyclonal.

62. The antibody of claim 32, wherein said antibody is monoclonal.

63. The antibody of claim 32, wherein said antibody is a human antibody or humanized antibody.

64. The antibody of claim 32, wherein said antibody is an antigen-binding fragment of an antibody.

65. The antibody of claim 32, wherein the antibody has a dissociation constant Kd of less than a value selected from the group consisting of 5×10⁻⁶M, 10⁻¹⁶M, 5×10⁻¹⁷M, 10⁻¹⁷M, 5×10⁻⁸M, 10⁻⁸M, 5×10⁻⁹M, 10⁻⁹M, 5×10⁻¹⁰M, 10⁻¹⁰M, 5×10⁻¹¹M, 10⁻¹¹M, 5×10⁻¹²M, 10⁻¹²M, 5×10⁻¹³M, 10⁻¹³M, 5×10⁻¹⁴M, 10⁻¹⁴M, 5×10⁻¹⁵M, and 10⁻¹⁵M.

66. The method of claim 38, wherein the animal is a human.

67. A method for treating or preventing Streptococcus infections in an animal, comprising administering to said animal the antibody of claim 33.

68. A method for treating or preventing Streptococcus infections in an animal, comprising administering to said animal the antibody of claim 61.

69. A method for treating or preventing Streptococcus infections in an animal, comprising administering to said animal the antibody of claim 62.

70. A method for treating or preventing Streptococcus infections in an animal, comprising administering to said animal the antibody of claim 63.

71. A method for treating or preventing Streptococcus infections in an animal, comprising administering to said animal the antibody of claim 64.

72. A method for treating or preventing Streptococcus infections in an animal, comprising administering to said animal the antibody of claim 65.

73. The method of claim 48, additionally comprising purifying said antibodies.

74. The method of claim 48, further comprising selecting antibodies capable of binding an intact Streptococcus pneumoniae cell.

75. The method of claim 48, wherein the animal is a transgenic animal capable of producing human antibodies.

76. The method of claim 57, wherein the determining step comprises a growth assay.

The application's sequence listing, which the Patent Office published only in electronic form, follows.

SEQUENCE LISTING (296 sequences)

SEQ ID NO: 1 - protein, 74 aa, Streptococcus pneumoniae
  MISC_FEATURE: >AnrP103029
MAVFEKVQEIIVEELGKDASEVTLESTFDDLDADSLDLFQVISEIEDAFDIQIEAENDLKTVGDLVAYVEEQAK

SEQ ID NO: 2 - protein, 413 aa, Streptococcus pneumoniae
  MISC_FEATURE: AnrP152053
MVLPNFKENLEKYAKLLVANGINVQPGHTLALSIDVEQRELAHLIVKEAYALGAHEVIVQWTDDVINREKFLHAPMERLDNVPEYKIAEMNYLLENKASRLGVRSSDPGALNGVDADKLSASAKAMGLAMKPMRIATQSNKVSWTVAAAAGLEWAKKVFPNAASDEEAVDFLWDQIFKTCRVYEADPVKAWEEHAAILKSKADMLNKEQFSALHYTAPGTDLTLGLPKNHVWESAGAVNAQGEEFLPNMPTEEVFTAPDFRRADGYVTSTKPLSYNGNIIEGIKVTFKDGQIVDITAEKGDQVMKDLVFENAGARALGECALVPDPSPISQSGITFFNTLFDENASNHLAIGAAYATSVVDGAEMSEEELEAAGLNRSDVHVDFMIGSNQMDIDGIREDGTRVPLFRNGNWAN

SEQ ID NO: 3 - protein, 353 aa, Streptococcus pneumoniae
  MISC_FEATURE: >AnrP153057
MNKRVQAFLAKMQEKELDGIIINNLKNVYYLTGFWGSNGTVFISRDRQVLVTDSRYIIAAKQETSGFEIVADRDELAVIAGIVKDMGLTRIGFEDEISVSYYHRMQAAFAGLDLLPQTQFVEGLRMIKDEAEIAAIRKACSISDQAFRDALDFIKPGKTEIEIANFLDFRMRELGASGLSFDTILASGINSSKPHAHPMHKPVELGEAITMDFGCLYDHYVSDMTRTIYLGHVSDEQAEIYNTVLKANQALIDQAKAGLGFRDFDKIPRDIIIEAGYGDYFTHGIGHGIGLDIHEEPYFSQTSTETIKTGMVLTDEPGIYIEGKYGVRIEDDILITETGCELLTLAPKELIVI

SEQ ID NO: 4 - protein, 235 aa, Streptococcus pneumoniae
  MISC_FEATURE: AnrP154031
MIYAGILAGGTGTRMGISNLPKQFLELGDRPILIHTIEKFVLEPSIEKIVVGVHGDWVSHAEDLVDKYLPLYKERIIITKGGADRNTSIKNIIEAIDAYRPLTPEDIVVTHDSVRPFITLRMIQDNIQLAQNHDAVDTVVEAVDTIVESTNGQFITDIPNRAHLYQGQTPQTFRCKDFMDLYGSLSDEEKEILTDACKIFVIKGKDVALAKGEYSNLKITTVTDLKIAKSMIEKD

SEQ ID NO: 5 - protein, 88 aa, Streptococcus pneumoniae
  MISC_FEATURE: AnrP169731
MGFTEETVRFKLDDSNKKEISETLTDVYASLNDKGYNPINQIVGYVLSGDPAYVPRYNNARNQIRKYERDEIVEELVRYYLKGQGVDL

SEQ ID NO: 6 - protein, 848 aa, Streptococcus pneumoniae
  MISC_FEATURE: AnrP201747
MQAVEHFIKQFVPEHYDLFLDLSRETKTFSGKVTITGQAQSDRISLHQKDLEITSVEVAGQARPFTVDHDNEALHIELAEAGQVELVLAFSGKITDNMTGIYPSYYTVDGVKKEVLSTQFESHFAREAFPCVDEPEAKATFDLSLRFDQAEGELALSNMPEIDVENRKETGIWKFETTPRMSSYLLAFVAGDLQGVTAKTKNGTLVGVYSTKAHPLSNLDFSLDIAVRSIEFYEDYYGVKYPIPQSLHIALPDFSAGAMENWGLVTYREVYLVVDENSTFASRQQVALVVAHELAHQWFGNLVTMKWWDDLWLNESFANMMEYVCVDTIEPSWNIFEDFQTGGVPLALERDATDGVQSVHVEVKHPDEINTLFDGAIVYAKGSRLMHMLRRWLGDADFAKGLHAYFEKHQYSNTIGSDLWDALGQASGRDVAAFMDSWLEQPGYPVLTVKVENDVLKISQKQFFIGENEDKNRLWVVPLNSNWKGLPDTLETESIEIPGYAALLAENEGALRLNTENTAHYITDYQGDLLEAVLAELETLDNTSKLQIVQERRLLAEAGHISYADLLPVLDKLAKEESYLVVSAVSQVISALERFIDEGTDAETAFKGLVAKLARHNYDRLGFEAKDGESDEDELVRQLAVSMMIRSNDAEASQVASQIFATHKENLAGLPAAIRSQVLINEMKHHETKDLLALYLDTYTHATDAVFKRQLAAALAYSTDADNIQNLITSWKDKFVVKPQDLSAWYYQFLAHQATQKTAWSWARENWAWIKAALGGDMSFDSFVILPAHVFKTQQRLAEYKEFFEPQLSDLALSRNIGMGIKEIAARVDLISREKAAVEAVVLQYGNA

SEQ ID NO: 7 - protein, 181 aa, Streptococcus pneumoniae
  MISC_FEATURE: AnrP204323
MEFEEKTLSRKEIYQGPIFKLVQDQVELPEGKGTAQRDLIFHNGAVCVLAVTDEQKLILVKQYRKAIEAVSYEIPAGKLEVGENTAPVAAALRELEEETAYTGKLELLYDFYSAIGFCNEKLKLYLASDLTKVENPRPQDEDETLEVLEVSLEEAKELIQSGHICDAKTIMAVQYWELQKK

SEQ ID NO: 8 - protein, 112 aa, Streptococcus pneumoniae
  MISC_FEATURE: AnrP313097
MSNIYDSANELSRGLRGLPEYKAVKAAKDAIAADAEASKIFTDYLAFQEEIQKLAQTGQMPDASFQAKMEGFGKQIQGNSLLSEFFTKQQQLAIYLSDIEKIVFEPVSELLK

SEQ ID NO: 9 - protein, 101 aa, Streptococcus pneumoniae
  MISC_FEATURE: AnrP322675
MIKILAACGAGVNSSHQIKSALEEELSNRGYDVHCDAVMVKDVNEDLMKGYDIFTPIAATDLGFEPGIPVIEAGPILFRIPAMSAPVFDNIEAAIKEHGLS

SEQ ID NO: 10 - protein, 208 aa, Streptococcus pneumoniae
  MISC_FEATURE: AnrP373646
MIFTYNKEHVGDVLMVIVKNSGDAKLDVERKGKVARVFLKDNGETVAWNIFEVSSLFEIAERGQVFLTDEQVARLNQELQAEGFTEEIVNDKEPKFVVGEIVEMVAHPDSDHLNICQVAVASDKTVQIVAGAPNARVGLKTIVALPGAMMPKGNLIFPGELRGEKSFGMMCSPRELHLPNAPQKRGVLELSEDQVVGTPFDPAKHWTA

SEQ ID NO: 11 - protein, 218 aa, Streptococcus pneumoniae
  MISC_FEATURE: AnrP406411
MFEIFKSYQFNQEKAHDYGFIENSEVWTYSCQILQGDFVMTVSITADNVSFQVFDQETGDLYPHVYMESMRGSFVGNVREACLEILYQIRKACFDVQDFICHQTKRIMTQVQEKYGNQLEYLWEKSPDTAVLRHEGNQKWYAVLMKISWNKLEKGREGQVEAVNLKHDQVANLLSQKGIYPAFHMSKRYWISVSLDDTLSDEEVLELIEKSWNLTSKK

SEQ ID NO: 12 - protein, 115 aa, Streptococcus pneumoniae
  MISC_FEATURE: AnrP428269
MEQFLDNIKDLEVTTVVRAQEALDKKETATFFIGRKTCPYCRKFAGTLSGVVAETKAHIYFINSEEPSQLNDLQAFRSRYGIPTVPGFVHITDGQINVRCDSSMSAQEIKDFAGL

SEQ ID NO: 13 - protein, 96 aa, Streptococcus pneumoniae
  MISC_FEATURE: AnrP454144
MQNMMRQAQKLQKQMEQSQAELAAMQFVGKSAQDLVQATLTGDKKVVSIDFNPAVVDPEDLETLSDMTVQAINSALEQIDETTKKKLGAFAGKLPF

SEQ ID NO: 14 - protein, 145 aa, Streptococcus pneumoniae
  MISC_FEATURE: AnrP489396
MSQEFINPSDGVIRQYLATSKTLAVVGLSDREETTSNRVTKEMQARGYKIIPVNPKAAGGEILGEKAYASLAEIPFPVDIVNVYRRSEFLPDVARDFLKADAKIFWAQLGLESLEAKEILRDGGCDDIVMNRCIKREHTRLIEEA

SEQ ID NO: 15 - protein, 209 aa, Streptococcus pneumoniae
  MISC_FEATURE: AnrP494708
MQVLLFCCNIFYNNERVLEILRKRRHIMSKKVLFIVGSLRQGSFNHQMALEAEKALAGKAEVSYLDYSALPLFSQDLEVPTHPAVAAAREAVLVADAIWIFSPVYNFSIPGTVKNLLDWLSRALDLSDTRGVSALQDKFVTVSSVANAGHDQLFAIYKDLLPFIRTQGVGDFTAARVNDSAWADGKLVLEETVLNSLEKQAQDLVEAIK

SEQ ID NO: 16 - protein, 329 aa, Streptococcus pneumoniae
  MISC_FEATURE: AnrP516029
MKYIINHSNDTAFNIALEEYAFKHLLDEDQIFLLWINKPSIIVGRHQNTIEEINRDYVRENGIEVVRRISGGGAVYHDLNNLNYTIISKEDENKAFDFKSFSTPVINTLAQLGVKAEFTGRNDLEIDGKKFCGNAQAYINGRIMHHGCLLFDVDLSVLANALKVSKDKFESKGVKSVRARVTNIINELPKKITVEKFRDLLLEYMKKEYPEMTEYVFSEEELAEINRIKDTKFGTWDWNYGKSPEFNVRRGIKFTSGKVEVFANVTESKIQDIKIYGDFFGIEDVAAVEDVLRGVKYEREDVLKALKTIDITRYFAGISREEIAEAVVG

SEQ ID NO: 17 - protein, 376 aa, Streptococcus pneumoniae
  MISC_FEATURE: AnrP56981
MVELNLKNIYKKYPNSEHYSVEDFNLNIKDKEFIVFVGPSGCGKSTTLRMIAGLEDITEGTASIDGVVVNDVAPKDRDIAMVFQNYALYPHMTVYDNMAFGLKLRKYSKEDINKRVQEAAEILGLKEFLERKPADLSGGQRQRVAMGRAIVRDAKVFLMDEPLSNLDAKLRVSMRAEIAKIHRRIGATTIYVTHDQTEAMTLADRIVIMSATKNPAGTGTIGRVEQIGTPQEVYKNPVNKFVAGFIGSPAMNFINVKLVGSEIVSDGFRLKVPEGALKVLREKGYEGKELIFGIRPEDVNAEPAFLETFPDCVVKATISVSELLGSESHLYCQVGKDEFVAKVDARDYLQTGATVELGFDLNKAHFFDVETEKTIY

SEQ ID NO: 18 - protein, 152 aa, Streptococcus pneumoniae
  MISC_FEATURE: AnrP594255
MIISEQSDFKRYASVNKYFSKVCDFLENTNLTDLVDGKIDIDGENVFANCMTYLADGVPGDIFETHKKYLDIHIVVENTEKMAVTSPVRAQSRVPFSEEKDIAFYDSKDYQIVELLPGNMLVTFEEDLHQPKIHCNDETVKKLVIKVLNEEK

SEQ ID NO: 19 - protein, 299 aa, Streptococcus pneumoniae
  MISC_FEATURE: AnrP732933
MFVNFFHEKEKIMRYDFGKVYKEIRESKGLTQEEVCGGVLSRTSLSKIESGKTTPKYENMEFLLRQINMSFEEFEYICQLYQPSQRTEIMQTYLNMRSIIGTSDLVNLFQKCQDYLKTHHDLPIEEIRDMLEVVIYLRQHGAGELSKHAEQVVKKLWKKIEKQDTWYESDLKILNTILFSFPIEYLHLITGKILQRLEVYKNYQHLYDLRMTILLNLSTLYLYNQDKNMCKQICYTLLEDAKNKKSYDRLAICYVRIGICTDDSKLIQKGFSLLELTEETSMLSHLKKEVEIYYQAKER

SEQ ID NO: 20 - protein, 196 aa, Streptococcus pneumoniae
  MISC_FEATURE: AnrP800607
MIPVVIEQTSRGERSYDIYSRLLKDRIIMLTGPVEDNMANSVIAQLLFLDAQDSTKDIYLYVNTPGGSVSAGLAIVDTMNFIKADVQTIVMGMAASMGTVIASSGAKGKRFMLPNAEYMIHQPMGGTGGGTQQTDMAIAAEHLLKTRNTLEKILAENSGQSMEKVHADAERDNWMSAQETLEYGFIDEIMANNSLN

SEQ ID NO: 21 - protein, 605 aa, Streptococcus pneumoniae
  MISC_FEATURE: AnrP834127
MRIKWFSLIRIIGLLLVLLYHFFQTIFPGGFFGVDVFFTFSGFLITALLIEEFSKNNEIDLIGFFRRRFYRIVPPVVLMVLVTMPFTFLVRQDYVAGIGGQIAGVLGFMTNFYELLTGGSYESQFIPHLFVHNWSLAVEVHYYILWGLAVWFLSKQAKSNGQLKGMVFLLSAVAFLISFFSMFIGSFLVTSYSSVYFSSLTHVYPFFLGSMLATIVGVRQTTSLVKQLDKIWDLRKTLVVFGGGFGFLVLLTFFVKFTYLFAYLIGFLLASLAALAMILAARVLHEKTHHIQESKIISFLADTSYAVYLFHWPFYIIFSQLTSNLLAVLLTLICSYGFASLSFYVLEPWIAGKNTPIVQTLRPLPYIHAILAAGTGILTIIVCTVTLLAPQVGAFETDLTVNGLKQAATNIGQTKVMAERADANSLGIADGTMLIGDSVALRANTALQTALPGAQINAQVSVTTKTANEIMLNNSQNKFLPKTVVIATGVNNPENYKDDWDSIVKNLPKGHHMILVTPYEGDKTKETYAIVEKAAAYMRELAEKTPYITIADWNQVAKEHPEIWAGTDQVHFGSESSTIEAGAKLYADTIATALQTAQDKPVKSK

SEQ ID NO: 22 - protein, 210 aa, Streptococcus pneumoniae
  MISC_FEATURE: AnrP856854
MIELKQVSKSFGERELFSNLSMTFEAGKVYALIGSSGSGKTTLMNMIGKLEPYDGTIFYRGKDLANYKSSDFFRHELGYLFQNFGLIENQSIEENLKLGLIGQKLSRSEQRLRQKQALEQVGLVYLDLDKRIFELSGGESQRVALAKIILKNPPFILADEPTASIDPATSQLIMEILLSLRDDNRLIIIATHNPAIWEMADEVFTMDHLK

SEQ ID NO: 23 - protein, 217 aa, Streptococcus pneumoniae
  MISC_FEATURE: AnrP859722
MLRSQFEEDLEKLHNQFYAMGQEVLSQINRTVRAFVTHDRDLAKEVIEDDAEVNEYEVKLEKKSFEMIALQQPVSQDLRTVLTVLKAVSDVERMGDHAVAIAQATIRMKGEERIPAVEEEIKKMGREVKSVVEAALDLYLNGSVDDAYRVASMDEQINHYFETIRDLATEEIKKNPEAIVTGRDYFQVISYLERIGDYAKNICEWVVYFETGKIVEL

SEQ ID NO: 24 - protein, 424 aa, Streptococcus pneumoniae
  MISC_FEATURE: AnrP871789
MSKENPLSHHEQLRYDYLLKNIHYLNEREKNEFAYLQEKLTLARGNSSSSLEQEREEQVDLPSYANRSRSQSKSQALSFPPKKKRRKLRLKRIFMVIFSLLVCVALAMVFMFLRGYQDASAKKTADARAAQVEVFNGQDTRDGVNILIMGTDGRIGQNSVETRTDSIMVLNVGGSDKKMKLVSFMRDNLVYIDGYSQVINGRKQTDNKLNVAYELGEQEGQKGAEMVRQVLKDNFDLDIKYYALVDFQAFATAIDTLFPDGVTIDAQFSTLNGRPLTEATVGDDLYATETESPTQTIKVGKQQMNGSTLLNYARFRDDDEADYGRTKRQQQVLTAILEQIKDPTKLFTGSEALGKVFAMTSTNVPYTFLLTNGLSVLDGAKNGIEKLTIPELGDWVDAYDVYGGLGLLVDQNKYQTKLAQMGLR

SEQ ID NO: 25 - protein, 408 aa, Streptococcus pneumoniae
  MISC_FEATURE: AnrP884020
MPNYNIPFSPPDITEAEITEVVDTLRSGWITTGPKTKELERRLSLYTQTPKTVCLNSATAALELILRVLEVGPGDEVIVPAMTYTASCSVITHVGATPVMVDIQADTFEMDYDLLEQAITEKTKVIIPVELAGIVCDYDRLFQVVEKKRDFFTASSKWQKAFNRIVIVSDSAHALGSIYKGQPSGSIADFTSFSFHAVKNFTTAEGGSATWKANPVIDDEEMYKEFQILSLHGQTKDALAKMQLGSWEYDIVTPAYKCNMTDIMASLGLVQLDRYPSLLQRRKDIVDRYDSGFAGSRIHPLAHKTETVESSRHLYITRVEGASLEERNLIIQELAKAGIASNVHYKPLPLLTAYKNLGFDMTNYPKAYAFFENEITLPLHTKLSDEEVDYIIETFKTVSEKVLTLSKK

SEQ ID NO: 26 - protein, 160 aa, Streptococcus pneumoniae
  MISC_FEATURE: AnrP944060
MSKEVIVESFELDHTIVKAPYVRLIGEETGPKGDIISNYDIRLVQPNEDSIPTAGLHTIEHLLAKLIRTRIDGMIDCSPFGCRTGFHMIMWGRHTSAKIAAVIKDSLKEIAETTTWEDVPGTTIESCGNYKDHSLFSAKEWAKLILEQGISDDAFERHVI

SEQ ID NO: 27 - protein, 100 aa, Streptococcus pneumoniae
  MISC_FEATURE: AnrP948024
MRAQSFFLTFSFIRSKIKLALNKGVLNMIEITYIDASKNERTVTFESYEDFERSQQACLIGVADYYPVQKLTYKGHNLDYHGTYGDIFFYLMKQDLSQYN

SEQ ID NO: 28 - protein, 264 aa, Streptococcus pneumoniae
  MISC_FEATURE: AnrP98487
MTIKLVATDMDGTFLDGNGRFDMDRLKSLLVSYKEKGIYFAVASGRGFLSLEKLFAGVRDDIIFIAENGSLVEYQGQDLYEATMSRDFYLATFEKLKTSPYVDINKLLLTGKKGSYVLDTVDETYLKVSQHYNENIQKVASLEDITDDIFKFTTNFTEETLEDGEAWVNENVPGVKAMTTGFESIDIVLDYVDKGVAIVELVKKLGITMDQVMAFGDNLNDLHMMQVVGHPVAPENARPEILELAKTVIGHHKERSVIAYMEGL

SEQ ID NO: 29 - protein, 413 aa, Streptococcus pneumoniae
  MISC_FEATURE: AnrP107243
MVLPNFKENLEKYAKLLVANGINVQPGHTLALSIDVEQRELAHLIVKEAYALGAHEVIVQWTDDVINREKFLHAPMERLDNVPEYKIAEMNYLLENKASRLGVRSSDPGALNGVDADKLSASAKAMGLAMKPMRIATQSNKVSWTVAAAAGLEWAKKVFPNAASDEEAVDLLWDQIFKTCRVYEADPVKAWEEHAAILKSKADMLNKEQFSALHYTAPGTDLTLGLPKNHVWESAGAVNAQGEGFLPNMPTEEVFTAPDFRRADGYVTSTKPLSYNGNIIEGIKVIFKDGQIVDITAEKGDQVMKDLVFENAGARALGECALVPDPSPISQSGITFFNTLFDENASNHLAIGAAYATSLVDGAEMSEEELEAAGLNRSDVHVDFMIGSNQMDIDGIREDGTRVPLFRNGNWAN

SEQ ID NO: 30 - protein, 200 aa, Streptococcus pneumoniae
  MISC_FEATURE: AnrP118660
MATTESLGRRRGNRRAYLSIDKKELSRYNLGSCFLIIDKIMEVHMKTISLVYISLSGNTESFVTRLKDYLLSQYKRIEVQKIHIKDLVKEGKNFYEMDHPYVAFLPTYLEGGNGVDNGDVEILTTPVGDFIAYGNNASKCFGVVGSGNRNFNNQYCLTAKQYSQRFGFPVLADFEMRGMLEDIKHVAAIIADLYELEKEN

SEQ ID NO: 31 - protein, 184 aa, Streptococcus pneumoniae
  MISC_FEATURE: AnrP131354
MDTQKIEAAVKMIIEAVGEDANREGLQETPARVARMYQEIFSGLGQTAEEHLSKSFEIIDDNMVVEKDIFFHTMCEHHFLPFYGRAHIAYIPDGRVAGLSKLARTVEVYSKKPQIQERLNIEVADALMDYLGAKGAFVIIEAEHMCMSMRGVRKPGTATLTTVARGLFETDKDLRDQAYRLMGL

SEQ ID NO: 32 - protein, 130 aa, Streptococcus pneumoniae
  MISC_FEATURE: AnrP159129
MKIKKLLKMVIPVLMISAVGTTFVEANQIGAFSNFVITTSYKRTGYLTKENEGAEYIMNLNPCRNLHPMTVKHRIVNSNGEARSGESLTTCGTRSTHGNWATVGYVYAADMARQNWWDLSAAISGSWSPN

SEQ ID NO: 33 - protein, 257 aa, Streptococcus pneumoniae
  MISC_FEATURE: AnrP230653
MIFDTHTHLNVEEFAGREAEEIALAAEMGVTQMNIVGFDKPTIEHALELVDEYEQLYATIGWHPTEAGTYTEEVEAYLLDKLKHSKVVALGEIGLDYHWMTAPKEVQEQVFRRQIQLSKDLDLPFVVHTRDALEDTYEIIKSEGVGPRGGIMHSFSGTLEWAEKFVDLGMTISFSGVVTFKKATDLQEAAKELPLDKMLVETDAPYLAPVPKRGRENKTAYTRYVVDFIADLRGMTTEELAVATTANAERIFGLDSK

SEQ ID NO: 34 - protein, 284 aa, Streptococcus pneumoniae
  MISC_FEATURE: AnrP310966
MNTNLASFIVGLIIDENDRFYFVQKDGQTYALAKEEGQHTVGDTVKGFAYTDMKQKLRLTTLEVTATQDQFGWGRVTEVRKDLGVFVDTGLPDKEIVVSLDILPELKELWPKKGDQLYIRLEVDKKDRIWGLLAYQEDFQRLARPAYNNMQNQNWPAIVYRLKLSGTFVYLPENNMLGFIHPSERYAEPRLGQVLDARVIGFREVDRTLNLSLKPRSFEMLENDAQMILTYLESNGGFMTLNDKSSPDDIKATFGISKGQFKKALGGLMKAGKIKQDQFGTELI

SEQ ID NO: 35 - protein, 99 aa, Streptococcus pneumoniae
  MISC_FEATURE: AnrP332314
MNSDVLEFLRTETAEKISLYISEANRLEGDVTLLAPNSQDLEDIKNAMLSNSNLGLKVARLDVMKKIAYASTRNHYLTGATIFGDISKGTYNCDPKSYV

SEQ ID NO: 36 - protein, 360 aa, Streptococcus pneumoniae
  MISC_FEATURE: AnrP384168
MSKLQQILTYLESEKLDVAVVSDPVTINYLTGFYSDPHERQMFLFVLADQEPLLFVPALEVERASSTVSFPVVGYVDSENPWQKIKHALPQLDFKRVAVEFDNLILTKYHGLKTVFETAEFDNLTPRIQRMRLIKSADEVQKMMIAGLYADKAVHVGFDNISLDKTETDIIAQIDFAMKREGYEMSFDTMVLTGDNAANPHGIPAANKVENDALLLFDLGVLVNGYASDMTRTVAVGKPDQFKKDIYNLTLEAQQAALDFIKPGVTAHEVDRAAREVIEKAGYGEYFNHRLGHGIGMDVHEFPSIMEGNDMVIEEGMCFSAEPGIYIPGKVGVRIEDCGVVTKDGFDLFTSTSKDLLYFD

SEQ ID NO: 37 - protein, 443 aa, Streptococcus pneumoniae
  MISC_FEATURE: AnrP468792
MKIDITNQVKDEFLISLKTLISYPSVLNEGENGTPFGQAIQDVLEKTLEICRDIGFTTYLDPKGYYGYAEIGQGAELLAILCHLDVVPSGDEADWQTPPFEATIKDGWVFGRGVQDDKGPSLAALYAVKSLLDQGIQFKKRVRFIFGTDEETLWRCMARYNTIEEQASMGFAPDSSFPLTYAEKGLLQVKLHGPGSDQLELEVGGAFNVVPDKANYQGLLYEQVCNGLKEAGYDYQTTEQTVTVLGVPKHAKDASQGINAVIRLATILAPLQEHPALSFLATQAGQDGTGRQIFGDIADEPSGHLSFNVAGLMINHERSEIRIDIRTPVLADKEELVELLTRCAQNYQLRYEEFDYLAPLYVAKDSKLVSTLMQIYQEKTGDNSPAISSGGATFARTMPNCVAFGALFPGAKQTEHQANECAVLEDLYRAMDIYAEAVYRLAT

SEQ ID NO: 38 - protein, 340 aa, Streptococcus pneumoniae
  MISC_FEATURE: AnrP540869
MTVTIDWENLGFSYMKLPYRYLAHFKNGQWDQGELTEDATLHISESSPSLHYGQQAFEGLKAYRTKDGSVQLFRPDENAKRLQRTCDRLLMPQVPTDMFVEACKAVVRANEEYVPLYGIGGTLYLRPLLIGVGDIIGVKPAEEYIFTIFAMPVGNYFKGGLVPTNFLIQDEYDRAAPNGTGAAKVGGNYAASLLPGKMAKSRHFSDVIYLDPSTHTKIEEVGSANFFGITADNEFVTPLSPSILPSITKYSLLYLAEHRLGLTPIEGDVPIDNLDRFVEAGACGTAAVISPIGGIQHGDDFHVFYSETEVGPVTRKLYNELTGIQFGDIEAPEGWIVKVD

SEQ ID NO: 39 - protein, 100 aa, Streptococcus pneumoniae
  MISC_FEATURE: AnrP578829
MINILAACGAGVNSSHQIKSALEEELSNRGYDVHCDAVMVKDVNEDLMKGYDIFTPIAATDLGFEPGIPVIEAGPILFCIPAMSVPVFDNIRLPAKQNMV

SEQ ID NO: 40 - protein, 158 aa, Streptococcus pneumoniae
  MISC_FEATURE: AnrP578945
MTIVGCRIDGRLIHGQVANLWAGKLNVSRIMVVDDEVVNNDIEKSGLKLATPPGVKLSILPVEKAAANILGGKYDSQRLFIVARKPDRFLGLVEAGVPLETLNVGNMSQTPETRSITRSINVVDKDVEDFHKLAEKGVKLTAQMVPNDPISDFLSLLK

SEQ ID NO: 41 - protein, 213 aa, Streptococcus pneumoniae
  MISC_FEATURE: AnrP982843
MKIALINENSQASKNHIIYDSLKEATDKKDYQLFNYGMRGEEGESQLTYVQNGLMAAILLNTKAVDFVVTGCGTGVGAMLALNSFPGVVCGLAVDPTDAYLYSQINGGNALSIPYAKGFGWGAELTLKLMFERLFAEEMGGGYPRERVIPEQRNARILNEVKQITHNDLMTILKTIDQDFLKDTISGKYFQEYFFENCQDDEVAAYLKEVLAK

SEQ ID NO: 42 - protein, 409 aa, Streptococcus pneumoniae
  MISC_FEATURE: AnrP110506
MSSHPIQVFSEIGKLKKVMLHRPGKELENLLPDYLERLLFDDIPFLEDAQKEHDAFAQALRDEGIEVLYLEQLAAESLTSPEIRDQFIEEYLDEANIRDRQTKVAIRELLHGIKDNQELVEKTMAGIQKVELPEIPDEAKDLTDLVESEYPFAIDPMPNLYFTRDPFATIGNAVSLNHMFADTRNRETLYGKYIFKYHPIYGGKVDLVYNREEDTRIEGGDELVLSKDVLAVGISQRTDAASIEKLLVNIFKKNVGFKKVLAFEFANNRKFMHLDTVFTMVDYDKFTIHPEIEGDLHVYSVTYENEKLKIVEEKGDLAELLAQNLGVEKVHLIRCGGGNIVAAAREQWNDGSNTLTIAPGVVVVYDRNTVTNKILEEYGLRLIKIRGSELVRGRGGPRCMSMPFEREEV

SEQ ID NO: 43 - protein, 191 aa, Streptococcus pneumoniae
  MISC_FEATURE: AnrP127490
MTKALISIDYTEDFVADSGKLTAGAPAQAISDAISKVTRLAFERGDYIFFTIDAHEENDCFHPESKLFPPHNLIGTSGRNLYGDLGIFYQEHGSDSRVFWMDKRHYSAFSGTDLDIRLRERRVSTVILTGVLTDICVLHTAIDAYNLGYDIEIVKPAVASIWPENHQFALGHFKNTLGAKLVDENLNELSE

SEQ ID NO: 44 - protein, 197 aa, Streptococcus pneumoniae
  MISC_FEATURE: AnrP132965
MTDNFFGKTLAARKVEAIPGMLEFDIPVHGDNRGWFKENFQKEKMLPLGFPESFFAEGKLQNNVSFSRKNVLRGLHAEPWDKYISVADGGKVLGSWVDLREGETFGNTYQTVIDASKGIFVPRGVANGFQVLSDTVSYSYLVNDYWALELKPKYAFVNYADPSLGIEWENIAEAEVSEADKHHPLLKDVKPLKKEDL

SEQ ID NO: 45 - protein, 591 aa, Streptococcus pneumoniae
  MISC_FEATURE: AnrP17099
MTQGKITASAAMLNVLKTWGVDTIYGIPSGTLSSLMDALAEDKDIRFLQVRHEETGALAAVMQAKFGGSIGVAVGSGGPGATHLINGVYDAAMDNTPFLAILGSRPVNELNMDAFQELNQNPMYNGIAVYNKRVAYAEQLPKVIDEACRAAISKKGPAVVEIPVNFGFQEIDENSYYGSGSYERSFIAPALNEVEIDKAVEILNNAERPVIYAGFGGVKAGEVITELSRKIKAPIITTGKNFEAFEWNYEGLTGSAYRVGWKPANEVVFEADTVLFLGSNFAFAEVYEAFKNTEKFIQVDIDPYKLGKRHALDASILGDAGQAAKAILDKVNPVESTPWWRANVKNNQNWRDYMNKLEGKTEGELQLYQVYNAINKHADQDAIYSLDVGSTTQTSTRHLHMTPKNMWRTSPLFATMGIALPGGIAAKKDTPDRQVWNIMGDGAFNMCYPDVITNVQYDLPVINLVFSNAEYGFIKNKYEDTNKHLFGVDFTNADYGKIAEAQGAVGFTVDRIEDIDAVVAEAVKLNKGGKTVVIDARITQHRPLPVEVLELDPKLHSEEAIKAFKEKYEAEELVPFRLFLEEEGLQSRAIK

SEQ ID NO: 46 - protein, 104 aa, Streptococcus pneumoniae
  MISC_FEATURE: AnrP173501
MAKAITDATFEQETKDGLVLVDFWATWCGPCRMQGPILDKLSEELSEDVLKIVKMDVDENPNTARAFGIMSIPTLLFKKDGQVVKQVAGVHTAEQIKAIIAELS

SEQ ID NO: 47 - protein, 260 aa, Streptococcus pneumoniae
  MISC_FEATURE: AnrP174354
MTSLKLLKEKAPLVICITNDVVKNFTANGLVALGASPAMSEFPADLEDLLKYAGGLLINIGTLTDENWKLYQAALKIAEKYNVPAVLDPVACGAGEYRKKVADDLINNYKLAAIRGNAGEIASLVGIDVASKGVDSAGVDNIDEIALAANEKFNIPIVVTGEVDAIAVNGEVVMIHNGSAMMPKVIGTGCLLGAVVASFIGLEKGQELKSLKTAVLVYNIAGEIAEKRPNGHLPGTFKVEFINALYEITDEDVKEFKRVK

SEQ ID NO: 48 - protein, 257 aa, Streptococcus pneumoniae
  MISC_FEATURE: AnrP189426
MKNNRILALSGNDIFSGGGLSADLATYTLNGLHGFVAVTCLTALTEKGFEVFPTDDTIFQHELDSLRDVEFGGIKIGLLPTVSVAEKALDFIKQRPGVPVVLDPVLVCKETHDVAVSELCQELIRFFPYVSVITPNLPEAELLSGQEIKTLEDMKTAAQKLHDLGAPAVIIKGGNRLSQDKAVDVFYDGQTFTILENPVIQGQNAGAGCTFASSIASHLVKGDKLLPAVESSKAFVYRAIAQADQYGVRQYEANKNN

SEQ ID NO: 49 - protein, 137 aa, Streptococcus pneumoniae
  MISC_FEATURE: AnrP216529
MEQTFFIIKPDGVKRGLVGEVLKRIEQRGFTIEKLEFRSQVSEELIDQHYQDLVGQSFYPPIREFMTSGPVLVGVISGPKVIETWRTMMGATRPEEALPGTIRGDFAKAAGENEIIQNVVHGSDSEESAKREIALWF

SEQ ID NO: 50 - protein, 320 aa, Streptococcus pneumoniae
  MISC_FEATURE: AnrP240537
MMSQKIIGIDLGGTSIKFAILTTAGEIQGKWSIKTNILDEGSHIVDDMIESIQHRLDLLGLAAADFQGIGMGSPGVVDRDKGTVIGAYNLNWKTLQPIKQKIEKALGIPFFIDNDANVAALGERWMGAGDNQPDVVFITLGTGVGGGIVAEGKLLHGVAGAAGELGHITVDFDQPISCTCGKKGCLETVASATGIVNLTRRYADEYEGDAALKRLIDNGEEVTAKTVFDLAKEGDDLALIVYRNFSRYLGIACANIGSILNPSTIVIGGGVSAAGEFLLQGVQKVYDENSFPQVRTSTKLALATLGNDAGVIGAASLVLQ

SEQ ID NO: 51 - protein, 171 aa, Streptococcus pneumoniae
  MISC_FEATURE: AnrP272457
MRIAIGCDHIVTDEKMAVSEFLKSKGYEVIDFGTYDHTRTHYPIFGKKVGEAVTSGQADLGVCICGTGVGINNAVNKVPGVRSALVRDMTTALYAKEQLNANVIGFGGKITGELLMCDIIEAFIHAEYKPTEENKKLIAKIEHVESHNAQQTDANFFTEFLEKWDRGEYHD

SEQ ID NO: 52 - protein, 303 aa, Streptococcus pneumoniae
  MISC_FEATURE: AnrP278845
MIYTVTLNPSIDYIVRLDQVKVGSVNRMDSDDKFAGGKGINVSRVLKRLNIPNTATGFIGGFTGKFITDTLAEEEIETRFVQVAEDTRINVKIKADQETEINGTGPTVEPVQLEELKAILSSLTAEDTVVFAGSSAKNLGNVIYKDLISLTRQTGAQVVCDFEGQTLIDSLDYQPLLVKPNNHELGAIFGVKLESLDEIEKYARELLAKGAQNVIISMAGDGALLVTSEGAYFAKPIKGTVKNSVGAGDSMVAGFTGEFVKSKDAVEAFKWGVACGTATTFSDDLATAEFIKETYGKVEVEKR

SEQ ID NO: 53 - protein, 311 aa, Streptococcus pneumoniae
  MISC_FEATURE: AnrP290066
MSYQDLKECKIITAFITPFHEDGSINFDAIPALIEHLLDHHTDGILLAGTTAESPTLTHDEELELFAAVQKIVNGRVPLIAGVGTNDTRDSIEFVKEVAEFGGFAAGLAIVPYYNKPSQEGMYQHFKAIADASDLPIIIYNIPGRVVVELTPETMLRLADHPNIIGVKECTSLANMAYLIEHKPEEFLVYTGEDGDAFHAMNLGADGVISVASHTNGDEMHEMFIAIAESDVKKAAAIQRKFIPKVNALFSYPSPAPVKAVLNYMGFEAGPTRLPLVPAPEEDAKRIIKVVVDGDYEATKATVTGVLRPDY

SEQ ID NO: 54 - protein, 449 aa, Streptococcus pneumoniae
  MISC_FEATURE: AnrP294752
MSHIKFDYSKVLDKFVAPHEVEYMQSQVTAADELIRKGTGAGSDFLGWLDLPEKYDREEFDRILKAAEQIKSDSDVLVVIGIGGSYLGAKAAIDFLNHHFANLQTKEERKAPQILYAGNSISSTYLADLVEYVADKDFSVNVISKSGTTTEPAIAFRVFKELLVKKYGQEEANKRIYATTDRQKGAVKVEADANGWGTFVVPDDIGGRFSVLTAVGLLPIAASGADIKALMEGANAARKDYTSDKISENEAYQYAAVRNILYRKGYATEILVNYEPSLQYFSEWWKQLAGESEGKDQKGIYPTSANFSTDLHSLGQFIQEGTRIMFETVVRVDKPRKNVLIPTLEEDLDGLGYLQGKDVDFVNKKATDGVLLAHTDGDVPNMYVTLPEQDAFTLGYTIYFFELAIALSGYLNAINPFDQPGVEAYKRNMFALLGKPGFEELSKELNARL

SEQ ID NO: 55 - protein, 326 aa, Streptococcus pneumoniae
  MISC_FEATURE: AnrP309710
MALTEQKRVRLEKLSDENGIISALAFDQRGALKRLMVKHQTEEPTVAQMEELKVLVADELTKYASSMLLDPEYGLPATKALDEKAGLLLAYEKTGYDTTSTKRLPDCLDVWSAKRIKEEGADAVKFLLYYDVDSSDELNQEKQAYIERIGSECVAEDIPFFLEILAYDEKIADAGSVEYAKVKPHKVIGAMKVFSDPRFNIDVLKVEVPVNIKYVEGFAEGEVVYTREEAAAFFKAQDEATNLPYIYLSAGVSAKLFQDTLVFAHESGANFNGVLCGRATWAGSVEAYIKDGEAAARECVRTTGFENIDELNKVLQRTATSWKERV

SEQ ID NO: 56 - protein, 269 aa, Streptococcus pneumoniae
  MISC_FEATURE: AnrP32013
MTFLNKIHETATFLKEKGIAAPEFGLILGSGLGELAEEIENPVVVDYAEIPNWGRSTVVGHAGKLVYGELAGRKVLALQGRFHFYEGNPLEVVTFPVRVMKVLGCEGVIVTNAAGGIGFGPGTLMAISDHINMTGQNPLMGENLDDFGPRFPDMSRAYTPEYRATAHEVAKKLNIKLDEGVYIGVTGPTYETPAEIRSYKTLGADAVGMSTVPEVIVAAHSGLKVLGISCITNFAAGFQEELNHEEVVEVTERVKGDFKGLLKAILAEL

SEQ ID NO: 57 - protein, 422 aa, Streptococcus pneumoniae
  MISC_FEATURE: AnrP335459
MLLIKNGRVMDPKSGLDQVCDVLVQDGKIIKIASEITEEGAETIDATGLVVAPGLVDIHVHFREPGQTHKEDIHTGALAAAAGGFTTVVMMANTSPTISDVETLQAVLQSAAKEKINVKTVATITKNFNGKNLTDFKALLEAGAVGFSDDGIPLESSKIVKEAMEEAKKLNTFISLHEEDPGLNGVLGFNENIAREHFHICGATGVAEYAMMARDVMIAYATKAHVHIQHLSKEESVKVVEFAQGLGAEVTAEVAPQHFSKTEALLLTQGSNAKMNPPLRLESDRRAVIEGLKSGVITVIATDHAPHHVDEKNVEDITKAPSGMTGLETSLSLSLTYLVEAGELSLMELLEKMTYNPAKLYNFEAGYLAENGPADITIFDAKADRFVDSHFASKAANSPFIGETLKGQVKYTICKGQIVYQA

SEQ ID NO: 58 - protein, 494 aa, Streptococcus pneumoniae
  MISC_FEATURE: AnrP337646
MTLVYQSTRDANNTVTASQAILQGLATDGGLFTPDTYPKVDLNFDKLKDASYQEVAKLVLSAFLDDFTVEELDYCINNAYDSKFDTPAIAPLVKLDGQYNLELFHGSTIAFKDMALSILPYFMTTAAKKHGLENKIVILTATSGDTGKAAMAGFANVPGTEIIVFYPKDGVSKIQELQMTTQTGDNTHVIAIDGNFDDAQTNVKHMFNDVALREKLTTNKLQFSSANSMNIGRLVPQIVYYVYAYAQLVKTGEIVAGEKVNFTVPTGNFGNILAAFYAKQIGLPVGKLICASNDNNVLTDFFKTRVYDKKREFKVTTSPSMDILVSSNLERLIFHLLGNNAEKTTELMNALNTQGQYKLTDFDAEILDLFAAEYATEEETAAEIKRVCELDSYIEDPHTAVASAVYKKYQSATGDVTKTVIASTASPYKFPVVAVEAVTGKAGLTDFEALAQLHEISGVAVPPAVDGLEIAPIRHKTTVAAADMQAAVEAYLGL

SEQ ID NO: 59 - protein, 223 aa, Streptococcus pneumoniae
  MISC_FEATURE: AnrP382550
MKTIQIAIDGPASSGKSTVAKIIAKDFGFTYLDTGAMYRAATYMALKNQLGVEEVEALLALLDQHPISFGRSETGDQLVFVGDVDITHPIRENEVTNHVSAIAAIPQVREKLVSLQQEIAQQGGIVMDGRDIGTVVLPQAELKIFLVASVDERAERRYKENIAKGIETDLETLKKEIAARDYKDSHRETSPLKQAEDAVYLDTTGLNIQEVVEKIKAEAEKRM

SEQ ID NO: 60 - protein, 126 aa, Streptococcus pneumoniae
  MISC_FEATURE: AnrP388835
MAKTIHTDKAPKAIGPYVQGKIVGNLLFASGQVPLSPETGEIVGENIQEQTEQVLKNIGAILAEAGTDFDHVVKTTCFLSDMNDFVPFNEVYQTAFKEEFPARSAVEVARLPRDVKVEIEVIAEIG

SEQ ID NO: 61 - protein, 262 aa, Streptococcus pneumoniae
  MISC_FEATURE: AnrP392175
MTNQNYLAKTTNKQYIVKFFGKGTEKLINRQDEKYNLELLKDLGLDVKNYLFDIEAGIKVNEYIESAITLDSTSIKTKFDKITPILQTIHTSAKELRGEFAPFEEIKKYESLIEEQIPYANYESVRNAVFSLEKRLADLGVDRKSCHIDLVPENFIESPQGRLYLIDWEYSSMNDPMWDLAALFLESEFTSQEEETFLSHYESDQTPVSHEKIAIYKILQDTIWSLWTVYKEEQGEDFGDYGVNRYQRAIKGLASYGGSDEK

SEQ ID NO: 62 - protein, 389 aa, Streptococcus pneumoniae
  MISC_FEATURE: AnrP398243
MDLTKRFNKQLDKIQVSLIRQFDQAISEIPGVLRLTLGEPDFTTPDHVKEAGKRAIDQNQSYYTGMSGLLTLRQAASDFVKEKYQLDYAPENEILVTIGATEALSATLTAILEEGDKVLLPAPAYPGYEPIVNLVGAEIVEIDTTENGFVLTPEMLEKAILEQGDKLKAVILNYPANPTGITYSREQLEALAAVLRKYEIFVVCDEVYSELTYTGEAHVSLGTMLRDQAIIINGLSKSHAMTGWRLGLIFAPATFTAQLIKSHQYLVTAANTMAQHAAVEALTAGKNDAEPMKKEYIQRRDYIIEKMTALGFEIIKPDGAFYIFAKIPAGYNQDSFAFLKDFAQKKAVAFIPGAAFGRYGEGYVRLSYAASMETIKEAMKRLEEYMREA

SEQ ID NO: 63 - protein, 225 aa, Streptococcus pneumoniae
  MISC_FEATURE: AnrP401255
MKLIVSVMPRSLEEAQALDATRYLDADIIEWRADYLPKEAILQVAPAIFEKFAGRELVFTLRTRSEGGEIDLSPEEYIHLIKEVAQLYQPDYIDFEYYSYKDVFEEMLDFPNLVLSYHNFQETPENMMEILSELTILNPKLVKVAVMAHTEQDVLDLMNYTRGFKTLNPEQEYVTISMGKVGKVSRITADVTGSSWSFASLDEVSAPGQISLASMKKIREILDEA

SEQ ID NO: 64 - protein, 354 aa, Streptococcus pneumoniae
  MISC_FEATURE: AnrP408652
MTTLFSKIKEVTELAAVSGHEAPVRAYLREKLTPHVDEVVTDGLGGIFGIKHSEAVDAPRVLVASHMDEVGFMVSEIKPDGTFRVVEIGGWNPMVVSSQRFKLLTRDGHEIPVISGSVPPHLTRGKGGPTMPAIADIVFDGGFADKAEAESFGIRPGDTIVPDSSAILTANEKNIISKAWDNRYGVLMVSELAEALSGQKLGNELYLGSNVQEEVGLRGAHTSTTKFDPEVFLAVDCSPAGDVYGGQGKIGDGTLIRFYDPGHLLLPGMKDFLLTTAEEAGIKYQYYCGKGGTDAGAAHLKNGGVPSTTIGVCARYIHSHQTLYAMDDFLEAQAFLQALVKKLDRSTVDLIKHY

SEQ ID NO: 65 - protein, 379 aa, Streptococcus pneumoniae
  MISC_FEATURE: AnrP422671
MKIDKYSAILGNTVGFHNMSTLTDHRPVASLPFGGKYRLIDFPLSSLANAGVRSVFGIFQQDNISSVFDHIRSGREWGLSTLLSHYYLGIYNTRVESSTVGKEYYQQLLTYLKRSGSNQTVALNCDVLINIDLNQVFHLHSTTKEPITVVYKKLAKKDISEVNAILDVDETDHVLSHKLFDSKSTAETFNMSTDIFVVDTPWLIEHLEEEAKKEHPEKLRYVLRDLAVKEGAFAYEYTGYLANIHSVKSYYQANIDMLESQKFYSLFSPNQKIYTKVKNEEPTYYANTSKVSTSQFASGSIIEGQVANSVLSRNIHVHKDSLVKDSLLFPRVVIGEGAQVEYAILDKGVEVEPGVVIRGTAEHPVVVKKGAKVTEDIHS

SEQ ID NO: 66 - protein, 126 aa, Streptococcus pneumoniae
  MISC_FEATURE: AnrP441701
MASKMLHTCLRVENLEKSIAFYQDAFGFKELRRRDFPDHAFTIVYLGLEGDDYELELTYNYDHGPYVVGDGFAHIALSTPDLEALHQEHSAKGYEVTEPNGLPGTTPNYYFVKDPDGYKVEVIREK

SEQ ID NO: 67 - protein, 236 aa, Streptococcus pneumoniae
  MISC_FEATURE: AnrP454140
MSIHIAAQQGEIADKILLPGDPLRAKFIAENFLDDAVCFNEVRNMFGYTGTYKGHCVSVMGTGMGMPSISIYARELIVDYGVKKLIRVGTAGSLNEEVHVRELVLAQAAATNSNIVRNDWPQYDFPQIASFDLLDKAYHIAKKLGMTTHVGNVLSSDVFYSNYFEKNIELGKWGVKAVEMEAAALYYLAAQYHVDALAIMTISDSLVNPDEDTTAEERQNTFTDMMKVGLETLIAE

SEQ ID NO: 68 - protein, 383 aa, Streptococcus pneumoniae
  MISC_FEATURE: AnrP454806
MPNYIKADQFFYPHGVRRGGYLELVDGKFGKHVEQIPEGAEVIDYTGYSIAPGLVDTHIHGYAGVDVMDNNIEGTLHTMSEGLLSTGVTSFLPTTLTATYEQLLAVTENLGNHYKEATGAKIRGIYYEGPYFTETFKGAQNPTYMRDPGVEEFHSWQKAANGLLNKIALAPERDGVEDFVRTVTGEGVTVALGHSNATFDEAKKAIDAGASVWVHAYNGMRGLTHRELGMVGAMYQLPHTYAELICDGHHVDPKACEILIKQKGTENIALITDCMTAGGLEDGDYMLGEFPVVVANGTARLKSTGNLAGSILKLKDGLKNVVEWGIANPHEAVMMASFNPAKSVHIDDVCGQIREGYDADFIVLDKDLELVATYLDGVKRYQA

SEQ ID NO: 69 - protein, 294 aa, Streptococcus pneumoniae
  MISC_FEATURE: AnrP455828
MTYYVAIDIGGTNIKYGLVDQEGQLLESHEMPTEAHKGGPHILQKTKDIVASYLEKGPVAGVAISSAGMVDPDKGEIFYAGPQIPNYAGTQFKKEIEESFTIPCEIENDVNCAGLAEAVSGSGKGASVTLCLTIGTGIGGCLIMDRKVFHGFSNSACEVGYMHMQDGAFQDLASTTALVKYVAEAHGEDVDQWNGRRIFKEATEGNKICMEGIDRMVDYLGKGLANICYVANPEVVILGGGIMGQEAILKPKIRTALKEALVPSLAEKTRLEFAHHQNTAGMLGAYYHFKTKQS

SEQ ID NO: 70 - protein, 87 aa, Streptococcus pneumoniae
  MISC_FEATURE: AnrP463907
MASKDFHVVAETGIHARPATLLVQTASKFASDITLEYKGKSVNLKSIMGVMSLGVGQGADVTISAEGADADDAIAAISETMEKEGLA

SEQ ID NO: 71 - protein, 141 aa, Streptococcus pneumoniae
  MISC_FEATURE: AnrP490410
MSIVIGADAAGLRLKEVVKDFLEKENFHLVDVTAEGQDFVDVTLAVAAEVNKEEQNLGIVIDAYGAGPFIVATKIKGMVAAEVSDERSAYMTRGHNNSRMITMGAQLVGDELAKNIAKGFVNGKYDGGRHQIRVDMLNKMG

SEQ ID NO: 72 - protein, 320 aa, Streptococcus pneumoniae
  MISC_FEATURE: AnrP517215
METYYKAINWNAIEDVIDKSTWEKLTEQFWLDTRIPLSNDLDDWRKLSNKEKDLVGKVFGGLTLLDTMQSETGVQALRADIRTPHEEAVFNNIQFMESVHAKSYSSIFSTLNTKAEIEEIFEWTNTNPYLQKKAEIVNEIYLNGSPLEKKVASVFLETFLFYSGFFTPLYYLGNNKLANVAEIIKLIIRDESVHGTYIGYKFQLGFNELPEEEQEKLKEWMYDLLYTLYENEEGYTESLYDGVGWTEEVKTFLRYNANKALMNMGQDPLFPDSAEDVNPIVMNGISTGTSNHDFFSQVGNGYLLGEVEAMQDDDYNYGLD

SEQ ID NO: 73 - protein, 184 aa, Streptococcus pneumoniae
  MISC_FEATURE: AnrP525615
MVKVAVILAQGFEEIEALTVVDVLRRANITCDMVGFEEQVTGSHAIQVRADHVFDGDLSDYDMIVLPGGMPGSAHLRDNQTLIQELQSFEQEGKKLAAICAAPIALNQAEILKNKRYTCYDGVQEQILDGHYVKETVVVDGQLTTSRGPSTALAFAYELVEQLGGDAESLRTGMLYRDVFGKNQ

SEQ ID NO: 74 - protein, 246 aa, Streptococcus pneumoniae
  MISC_FEATURE: AnrP579600
MEISLLTDVGQKRTNNQDYVNHYVNRAGRTMIILADGMGGHRAGNIASEMAVTDLGVAWVDTQIDTVNEVREWFAHYLEIENQKIHQLGQDEAYRGMGTTLEVLAIIDNQAIYAHIGDSRIGLIRGEEYHQLTSDHSLVNELLKAGQLTPEEAEAHPQKNIITQSIGQKDEIQPDFGTVILESGDYLLLNSDGLTNMISGSEIRDIVTSDIPLADKTETLVRFANNAGGLDNITVALVSMNEEDAE

SEQ ID NO: 75 - protein, 218 aa, Streptococcus pneumoniae
  MISC_FEATURE: AnrP582187
MSQYKIAPSILAADYANFEREIKRLEATGAEYAHIDIMDSHFVPQISFGAGVVESLRPHSKMVFDCHLMVSNPEHHLEDFARAGADIISIHVEATPHIHGALQKIRSLGVKPSVVINPGTPVEAIKHVLHLVDQVLVMTVNPGFGGQAFLPETMDKVRELVALREEKGLNFEIEVDGGIDDQTIAQAKEAGATVFVAGSYVFKGEVNERVQTLRKQLD

SEQ ID NO: 76 - protein, 91 aa, Streptococcus pneumoniae
  MISC_FEATURE: AnrP623633
MANKQDLIAKVAEATELTKKDSAAAVEAVFAAVADYLAAGEKVQLIGFGNFEVRERAERKGRNPQTGKEMTIAASKVPAFKAGKALKDAVK

SEQ ID NO: 77 - protein, 324 aa, Streptococcus pneumoniae
  MISC_FEATURE: AnrP649974
MEVFESLKANLVGKNARIVLPEGEEPRILQATKRLVKETEVIPVLLGNPEKIKIYLEIEGIMDGYEVIDPQHYPQFEEMVSALVERRKGKMTEEDVRKVLVEDVNYFGVMLVYLGLVDGMVSGAIHSTASTVRPALQIIKTRPNVTRTSGAFLMVRGTERYLFGDCAININPDAEALAEIAINSAITAKMFGIEPKIAMLSYSTKGSGFGESVDKVVEATKIAHDLRPDLEIDGELQFDAAFVPETAALKAPGSTVAGQANVFIFPGIEAGNIGYKMAERLGGFAAVGPVLQGLNKPVNDLSRGCNADDVYKLTLITAAQAVHQ

SEQ ID NO: 78 - protein, 197 aa, Streptococcus pneumoniae
  MISC_FEATURE: AnrP653724
MTDNFFGKILAVRKIDAIPGMLEFDIPVHGDNRGWFKENFQKEKMEPLGFPESFFAEGKLQNNVSFSRKNVLRGLHAEPWDKYISVADGGKVLGSWVDLREGETFGNTYQTIIDASKGIFVPRGVANGFQVLSDTVSYSYLVNDYWALELKPKYAFVNYADPSLGIEWENIAEAEVSEADKHHPLLKDVKPLKKEDL

SEQ ID NO: 79 - protein, 347 aa, Streptococcus pneumoniae
  MISC_FEATURE: AnrP682812
MKQTIILLYGGRSAEREVSVLSAESVMRAVNYDRFTVKTFFISQSGDFIKTQEFSQTPGQEDRLMTNATIDWDKQVAPSAIYEEGAVVFPVLHGPMGEDGSVQGFLEVLKMPYVGCNILSSSLAMDKITTKRVLESAGIAQVPYVAIVEGDDLTAKIAEVEEKLTYPVFTKPSNMGSSVGISKSENQEELRQALKLAFQYDSRVLVEQGVNAREIEVGLLGNYDVKSTLPGEVVKDVAFYDYDAKYIDNKITMDIPAKISDDVVPIMRQNAKTAFRAIGGLGLSRCNFFYTDKGEISLNKLNTMPGFTQWSMYPLLWDNMRISYPDLIERLVDLAKESFDKREAHLL

SEQ ID NO: 80 - protein, 214 aa, Streptococcus pneumoniae
  MISC_FEATURE: AnrP692615
MKILVTGFNPFGGEKINPALEAVKLLPSEINGAEVRWVEIPTVFYKSSEVLEAEILRYQPDAVLCIGQAGGRTGLTPERVAINQDDARIPDNEGNQPIDTPIRIDGASAYFSSLPIKAMVQAIKKQGLPAVVSNSAGTFVCNHLMYQALYLVDKKFPNMRAGFMHIPYMMEQVVNKPNTAGMSLCDIVRGIEVAIEAIVDYKDKDLQLVGGETH

SEQ ID NO: 81 - protein, 178 aa, Streptococcus pneumoniae
  MISC_FEATURE: AnrP701774
MNEVKKMVELKKEAVKDVTSLTKAAPVALAKTKEVLNQAVADLYVAHVALHQVHWYMHGRGFLVWHPKMDEYMEALDGQLDEISERLITLGGSPFSTLTEFLQNSEIEEEAGEYRNVEESLERVLVIYRYLSELFQKGLDVTDEEGDDVTNGIFAGAKTETDKTIWMLAAELGQAPGL

SEQ ID NO: 82 - protein, 352 aa, Streptococcus pneumoniae
  MISC_FEATURE: AnrP707898
MKAYTYVKPGLASFVDVDKPVIRKPTDAIVRIVKTTICGTDLHIIKGDVPTCQSGTILGHEGIGIVEEVGEGVSNFKKGDKVLISCVCACGKCYYCKKGIYAHCEDEGGWIFGHLIDGMQAEYLRVPHADNTLYHTPEDLSDEALVMLSDILPTGYEIGVLKGKVEPGCSVAIIGSGPVGLAALLTAQFYSPAKLIMVDLDDNRLETALSFGATHKVNSSDPEKAIKEIYDLTDGRGVDVAIEAVGIPATFDFCQKIIGVDGTVANCGVHGKPVEFDLDKLWIRNINVTTGLVSTNTTPQLLKALESHKIEPEKLVTHYFKLSEIEKAYEVFSKAADHHAIKVIIENDISEA

SEQ ID NO: 83 - protein, 105 aa, Streptococcus pneumoniae
  MISC_FEATURE: AnrP727368
MIQPASLEELASLVEKAGKKVFIFVADWCSDCRYIYPALPEIEETNPEFTFIRMDRDQYMDLAKLWDVYGIPSLVVLEKDKEIGRFVNRDRKSKQQINDFLAGLK

SEQ ID NO: 84 - protein, 150 aa, Streptococcus pneumoniae
  MISC_FEATURE: AnrP727454
MAQRYQNIMVAIDGSKEADLAFVKGVHSALRNDAKLTIAHVIDTRALQSVSTFDAEVYEELQVDAESLMKEYEKRAKDAGVADVHIVIEMGNPKTLLARTIPDAEEVDLILVGATGLNAFERLLVGSSSEYILRHAKVDLLVVREQEKTL

SEQ ID NO: 85 - protein, 147 aa, Streptococcus pneumoniae
  MISC_FEATURE: AnrP748591
MKIRGFELVSSFTDENLLPKRETAHAAGYDLKVAVRTVVAPGEIVLVPTGVKAYMQPTEVLYLYDRSSNPRKKGLVLINSVGVIDGDYYGNPGNEGHIFAQMKNITDQEVVLEVGERIVQAVFATFLIADGDAADGVRTGGFGSTGH

SEQ ID NO: 86 - protein, 343 aa, Streptococcus pneumoniae
  MISC_FEATURE: AnrP749497
MAFIEKGQEIDMEVIKAETQLSAEALRLKESRDRELADIISGEDDRILLVIGPCSSDNEEAVLEYARRLSALQKKVADKIFMVMRVYTAKPRTNGDGYKGLVHQPDTSKAPSLINGLQAVRQLHYRVITETGLTTADEMLYPSNLILVDDLVSYHAVGARSVEDQEHRFVASGIDAPVGMKNPTSGNLGVMFNAIYAAQNKQTFLYHGQEVETSGNPLAHVILRGAVNEYGNYMPNYYYENLLQAIERYETMGLENPFILIDTNHDNSGKQYMEQIRIVRQTLQNRDWNEKIKKTVRGFMIESYLADGRQNQPEIFGCSITDPCLGWENTEALVEEIYVTLTK

SEQ ID NO: 87 - protein, 203 aa, Streptococcus pneumoniae
  MISC_FEATURE: AnrP754359
MSAIERITKAAHLIDMNDIIREGNPTLRAIAEEVTFPLSDQEIILGEKMMQFLKHSQDPVMAEKMGLRGGVGLAAPQLDISKRIIAVLVPNIVEEGETPQEAYDLEAIMYNPKIVSHSVQDAALGEGEGCLSVDRNVPGYVVRHARVTVDYFDKDGEKHRIKLKGYNSIVVQHEIDHINGIMFYDRINEKDPFAVKDGLLILE

SEQ ID NO: 88 - protein, 572 aa, Streptococcus pneumoniae
  MISC_FEATURE: AnrP755180
MSYQENYQKWVDFVELPDYLRQDLENMDEKTKEDAFYTNLEFGTAGMRGLVGAGTNRINIYVVRQATEGLARLIESKGGNEKERGVAIAYDSRHFSPEFAFESAAVLAKHGIKSYVFESLRPTPELSFAVRHLNCFAGIMVTASHNPAPFNGYKVYGEDGGQMPPHDADALTTYIRAIENPFAVEVADVETEKASGLIEVIGEAVDIEYLKEVKDININPALIEEFGKDMKIVYTPLHGTGEMLARRALAQAGFDSVQVVEAQATADPDFSTVTSPNPESQAAFALAEELGRQVGADVLVATDPDADRVGVEVLQKDGSYLNLSGNQIGAIMAKYILEAHKNAGTLPENAALCKSIVSTDLVTKIAESYGATMFNVLTGFKFIAEKIQEFEEKHNHTYMMGFEESFGYLIKPFVRDKDAIQAVLVVAELAAYYRSRGLTLADGIEEIYKEYGYYAEKTISVTLSGVDGAEQIKAIMAKFRNNAPTEWNATAITVVEDFKAQTATVADGTVTNLTTPPSDVLKYTLADGSWIAVRPSGTEPKIKFYIAVVGETNEESQAKIANIEAEINAFVK

SEQ ID NO: 89 - protein, 173 aa, Streptococcus pneumoniae
  MISC_FEATURE: AnrP760417
MKTKEVVDELTVKRAITRITYEIIERNKDLNKIVLAGIKTRGVFIAHRIQERLKQLENLSVPVVELDTKPFRDDVKSGEDTSLVSVDVTDREVILVDDVLYTGRTIRAAIDNIVGHGRPARVSLAVLVDRGHRELPIRPDYVGKNIPTSRSEEIIVEMTELDDQDRVLITEEA

SEQ ID NO: 90 - protein, 408 aa, Streptococcus pneumoniae
  MISC_FEATURE: AnrP76357
MLDVEAIRKDFPILDQIVNDEPLVYLDNAATTQKPLVVLKAINSYYEQDNANVHRGVHTLAERATASYEAARETIRKFINAGSTKEVLFTRGTTTSLNWVARFAEEILTEGDQVLISVMEHHSNIIPWQEACRKTGAELVYVYLKDGALDMEDLRAKLTDKVKFVSLAHASNVLGVVNPIKEITQLAHQVGAIMVVDGAQSTPHMKIDVQDLDLDFFAFSGHKMAGPTGIGVLYGKEKYLEQMSPVEFGGEMIDFVYEQFASWKELPWKFEAGTPNMAGAIGLATAVDYLEKIGMDAVEAHEQELIAYVYPKLQAIEGLTIYGSQDLAQRSGVIAFNLGDLHPHDLATALDYEGVAVRAGHHCAQPLLQYLEVPATARASFYIYNTKADCDKLVDALQKTKEFFNGTF

SEQ ID NO: 91 - protein, 201 aa, Streptococcus pneumoniae
  MISC_FEATURE: AnrP769928
MAIILPELPYAYDALEPYIDAETMHLHHDKHHQTYVNNANAALEKHPEIGEDLEALLADVESIPADIRQALINNGGGHLNHALFWELMTPEKTAPSAELAAAIDATFGSFEEFQAAFTAAATTRFGSGWAWLVVNKEGKLEVTSTANQDTPISEGKKPILGLDVWEHAYYVKYRNVRPDYIKAFFSVINWNKVDELYAAAK

SEQ ID NO: 92 - protein, 178 aa, Streptococcus pneumoniae
  MISC_FEATURE: AnrP7750
MNEVKKMVELKKEAVKDVTSLTKAAPVALAKTKEVLNQAVADLYVAHVALHQVHWYMHGRGFLVWHPKMDEYMEALDGQLDEISERLITLGGSPFSTLTEFLQNSEIEEEAGEYRNVEESLERVLVIYRYLSELFQKGLDVTDEEGDDVTNGIFVGAKTETDKTIWMLAAELGQAPGL

SEQ ID NO: 93 - protein, 198 aa, Streptococcus pneumoniae
  MISC_FEATURE: AnrP796725
MTDNFFGKTLAARKVEAIPGMLEFDIPVHGDNRGWFKENFQKEKMLPLGFPESFFAEGKLQNNVSFSRKNVLRGLHAEPWDKYISVADGGKVQGSWVDLREGETFGNTYQTVIDASKGIFVPRGVANGFQVLSDTVSYSYLVNDYWALELKPKYAFVNYADPSLGIEWENIAEAEVSEADKHHPLLKDVKPLKKEDLE

SEQ ID NO: 94 - protein, 210 aa, Streptococcus pneumoniae
  MISC_FEATURE: AnrP81562
MTLAKDIASHLLKIQAVYLKPEEPFTWASGIKSPIYTDNRVTLAYPETRTLIENGFVEAIKEAFPEVEVIAGTATAGIPHGAIIADKMDLPFAYIRSKPKDHGAGNQIEGRVAQGQKMVVVEDLISTGGSVLEAVAAAKREGADVLGVVAIFSYQLPKADKNFADAGVKLVTLSNYSDLIHLAQEEGYITPEGLYLLKRFKEDQENWQEG

SEQ ID NO: 95 - protein, 466 aa, Streptococcus pneumoniae
  MISC_FEATURE: AnrP825823
MTAIDFTAEVEKRKEDLLADLFSLLEINSERDDSKADAQHPFGPGPVKALEKFLEIADRDGYPTKNVDNYAGHFEFGDGEEVLGIFAHMDVVPAGSGWDTDPYTPTIKDGRLYARGASDDKGPTTACYYGLKIIKELGLPTSKKVRFIVGTDEESGWADMDYYFEHVGLAKPDFGFSPDAEFPIINGEKGNITEYLHFAGENTGVARLHSFTGGLRENMVPESATAVVSGDLADLQAKLDAFVAEHKLRGELQEEAGKYKVTIIGKSAHGAMPASGVNGATYLALFLSQFGFAGPAKDYLDIAGKILLNDHEGENLKIAHVDEKMGALSMNAGVFHFDETSADNTIALNIRYPKGTSPEQIKSILENLPVVSVSLSEHGHTPHYVPMEDPLVQTLLNIYEKQTGFKGHEQVIGGGTFGRLLERGVAYGAMFPDSIDTMHQANEFIALDDLFRAAAIYAEAIYELIK

SEQ ID NO: 96 - protein, 237 aa, Streptococcus pneumoniae
  MISC_FEATURE: AnrP867340
MTETIKLMKAHTSVRRFKEQEIPQVDLNEILTAAQMASSWKNFQSYSVIVVRSQEKKDALYELVPQEAIRQSAVFLLFVGDLNRAEKGARLHTDTFQPQGVEGLLISSVDAALAGQNALLAAESLGYGGVIIGLVRYKSEEVAELFNLPDYTYSVFGMALGVPNQHHDMKPRLPLENVVFEEEYQEQSTEAIQAYDRVQADYAGARATTSWSQRLAEQFGQAEPSSTRKNLEQKKLL

SEQ ID NO: 97 - protein, 311 aa, Streptococcus pneumoniae
  MISC_FEATURE: AnrP889903
MSKILVFGHQNPDSDAIGSSVAFAYLAKEAYGLDTEAVALGTPNEETAFVLNYFGVEAPRVITSAKAEGAEQVILTDHNEFQQSVSDIAEVEVYGVVDHHRVANFETASPLYMRLEPVGSASSIVYRMFKEHGVAVPKEIAGLMLSGLISDTLLLKSPTTHPTDKIIAPELAELAGVNLEEYGLAMLKAGTNLASKSAEELIDIDAKTFELNGNNVRVAQVNTVDIAEVLERQAEIEAAMQAANESNGYSDFVLMITDIVNSNSEILALGANMDKVEAAFNFKLENNHAFLAGAVSRKKQVVPQLTESFNA

SEQ ID NO: 98 - protein, 136 aa, Streptococcus pneumoniae
  MISC_FEATURE: AnrP920891
MSDCIFCKIIAGEIPASKVYEDEQVLAFLDISQVTLGHTLVVPKEHYRNLLEMDATSASQLFAQVPKVAQKVMKVTKAAGMNIISNCEEVAGQTVFHTHVHLVPRYSADDDLKIDFIAHEPDFDKLAQVAETIKNA

SEQ ID NO: 99 - protein, 283 aa, Streptococcus pneumoniae
  MISC_FEATURE: AnrP927145
MILITGANGQLGTELRYLLDERNEEYVAVDVAEMDITDAEMVEKVFEEVKPTLVYHCAAYTAVDAAEDEGKELDFAINVTGTKNVAKASEKHGATLVYISTDYVFDGKKPVGQEWEVDDRPDPQTEYGRTKRMGEELVEKHVSNFYIIRTAWVFGNYGKNFVFTMQNLAKTHKTLTVVNDQYGRPTWTRTLAEFMTYLAENRKEFGYYHLSNDATEDTTWYDFAVEILKDTDVEVKPVDSSQFPAKAKRPLNSTMSLAKAKATGFVIPTWQDALQEFYKQEVR

SEQ ID NO: 100 - protein, 112 aa, Streptococcus pneumoniae
  MISC_FEATURE: AnrP9312
MNNLPNCPKCNSEYVYEDGALLVCPECAHEWNPAEVAEVEEGLVAIDANGNKLADGDTVTLIKDLKVKGAPKDLKQGTRVKNIRIVEGDHNIDCKIDGFGAMKLKSEFVRKI

SEQ ID NO: 101 - protein, 222 aa, Streptococcus pneumoniae
  MISC_FEATURE: AnrP938540
MEFMLDTLNLDEIKKWSEILPLAGVTSNPTIAKREGSINFFERIKDVRELIGSTPSIHVQVISQDFEGILKDAHKIRRQAGDDIFIKVPVTPAGLRAIKALKKEGYHITATAIYTVIQGLLAIEAGADYLAPYYNRMENLNIDSNSVIRQLALAIDRQNSPSKILAASFKNVAQVNNALAAGAHAVTAGADVFESAFAMPSIQKAVDDFSDDWFVIQNSRSI

SEQ ID NO: 102 - protein, 295 aa, Streptococcus pneumoniae
  MISC_FEATURE: AnrP94874
MTKLYGSLEAGGTKFVCAVGDENFNVVEKTQFPTTTPIETIDKTIEFFSKFDNLAGLAVGSFGPIDIDKNSKTYGFITTTPKPNWANVDLLGALRRALNVPMYFTTDVNSSAYGEMVARNNAGGRIENLVYYTIGTGIGAGVIQRGEFIGGVGHPEMGHYYVARHPMDIEKEFKGVCPFHKGCLEGYAAGPSLEARTGVRGETIELNNPVWDVQAYYIAQAAVNATVTFRPDVIVFGGGVMAQQHMLDRVREKFTSLLNGYLPVPDVRDYIVTPAVAGNGSATLGNFVLAKEVSK

SEQ ID NO: 103 - protein, 155 aa, Streptococcus pneumoniae
  MISC_FEATURE: AnrP961387
MNTYEGNLVANNIKIGIVVARFNEFITSKLLSGALDNLKRENVNEKDIEVAWVPGAFEIPLIASKMAKSKKYDAIICLGAVIRGNTSHYDYVCSEVSKGIAQISLNSEIPVMFGVLTTDTIEQAIERAGTKAGNKGSECAQGAIEMVNLIRTLDA

SEQ ID NO: 104 - protein, 395 aa, Streptococcus pneumoniae
  MISC_FEATURE: AnrP964574
MKLSNRVLEMEESVTLAAGARAKALKAEGRDILSLTLGEPDFTTPKNIQDAAIASIRDGRASFYTVTSGLPELKAAVNSYFERFYGYSVASNQVTVAAGAKYSLYTFFMAVVNPGDEVIIPTPYWVSYGDQVKMAEGVPVFVSAKEDNHFKVTVEQLEAARTDKTKVLVLNSPSNPTGMIYTREELLAIGNWAVENDILILADDIYGRLVYNGHEFTPISSLSEAIRKQTVVINGVSKTYAMTGWRIGYAVGEADIIAAMSKIAGQTTSNPSAVAQYAAVEALSGEQDTVESMRQAFEERLNTIYPLLAEVPGFEVVKPQGAFYLFPNVKKAMEMKGYTDVTDFTTVILEEAEVALVTGAGFGAPENVRLSYATDLDTLKEAVERLKAFMGSEND

SEQ ID NO: 105 - protein, 180 aa, Streptococcus pneumoniae
  MISC_FEATURE: AnrP970091
MLENDIKKVLVSHDEITEAAKKLGAQLTKDYAGKNPILVGILKGSIPFMAELVKHIDTHIEMDFMMVSSYHGGTASSGVINIKQDVTQDIKGRHVLFVEDIIDTGQTLKNLRDMFKEREAASVKIATLLDKPEGRVVEIEADYTCFTIPNEFVVGYGLDYKENYRNLPYIGVLKEEVYSN

SEQ ID NO: 106 - protein, 339 aa, Streptococcus pneumoniae
  MISC_FEATURE: AnrP896324
MKAVVVNPESTGVAIEEKVLRPLETGEALVEVEYCGVCHTDLHVAHGDFGQVPGRVLGHEGIGIVKEIAPDVKSLKVGDRVSVAWFFEGCGTCEYCTTGRETLCRTVKNAGYSVDGGMAEQCIVTADYAVKVPDGLDPAQASSITCAGVTTYKAIKEAKVEPGQWVVLYGAGGLGNLAVQYAKKVFNAHVIAVDINNDKLALAKEVGADIVINGLEVEDVAGLIKEKTDGGAHSAVVTAVSKVAFNQAVDSIRAGGRVVAVGLPSEMMELSIVKTVLDGIQVIGSLVGTRKDLEEAFQFGAEGLVVPVVQKRPVEDAVAIFDEMEKGQIQGRMVLDFTH

SEQ ID NO: 107 - protein, 306 aa, Streptococcus pneumoniae
  MISC_FEATURE: AnrP44215
MTKTAFLFAGQGAQYLGMGRDFYDQYPIVKETIDRASQVLGYDLRYLIDTEEDKLNQTRYTQPAILATSVAIYRLLQEKGYQPDMVAGLSLGEYSALVASGALDFEDAVALVAKRGAYMEEAAPADSGKMVAVLNTPVEVIEEACQKASELGVVTPANYNTPAQIVIAGEVVAVDRAVELLQEAGAKRLIPLKVSGPFHTALLEPASQKLAETLAQVSFSDFTCPLVGNTEAAVMQKEDIAQLLTRQVKEPVRFYESIGVMQEAGISNFIEIGPGKVLSGFVKKIDQTAHLAHVEDQASLVALLEK

SEQ ID NO: 108 - protein, 411 aa, Streptococcus pneumoniae
  MISC_FEATURE: AnrP450910
MKLNRVVVTGYGVTSPIGNTPEEFWNSLATGKIGIGGITKFDHSDFDVHNAAEIQDFPFDKYFVKKDTNRFDNYSLYALYAAQEAVNHANLDVEALNRDRFGVIVASGIGGIKEIEDQVLRLHEKGPKRVKPMTLPKALPNMASGNVAMRFGANGVCKSINTACSSSNDAIGDAFRSIKFGFQDVMLVGGTEASITPFAIAGFQALTALSTTEDPTRASIPFDKDRNGFVMGEGSGMLVLESLEHAEKRGATILAEVVGYGNTCDAYHMTSPHPEGQGAIKAIKLALEEAEISPEQVAYVNAHGTSTPANEKGESGAIVAVLGKEVPVSSTKSFTGHLLGAAGAVEAIVTIEAMRHNFVPMTAGTSEVSDYIEANVVYGQGLEKEIPYAISNTFGFGGHNAVLAFKRWENR

SEQ ID NO: 109 - protein, 774 aa, Streptococcus pneumoniae
  MISC_FEATURE: AnrP10361
MVVKTVVEAQDIFDKAWEGFKGVDWKEKASVSRFVQANYTPYDGDESFLAGPTERSLHIKKIVEETKAHYEETRFPMDTRPTSIADIPAGFIDKENEVIFGIQNDELFKLNFMPKGGIRMAETTLKENGYEPDPAVHEIFTKYVTTVNDGIFRAYTSNIRRARHAHTVTGLPDAYSRGRIIGVYARLALYGADYLMQEKVNDWNAIKEIDEETIRLREEVNLQYQALQQVVRLGDLYGVDVRKPAMNVKEAIQWVNIAFMAVCRVINGAATSLGRVPIVLDIFAERDLARGTFTESEIQEFVDDFVMKLRTVKFARTKAYDQLYSGDPTFITTSMAGMGNDGRHRVTKMDYRFLNTLDNIGNSPEPNLTVLWTDKLPYNFRRYCMHMSHKHSSIQYEGVTTMAKDGYGEMSCISCCVSPLDPENEEQRHNIQYFGARVNVLKALLTGLNGGYDDVHKDYKVFDIEPIRDEVLEFESVKANFEKSLDWLTDTYVDALNIIHYMTDRYNYEAVQMAFLPTKQRANMGFGICGFANTVDTLSAIKYATVKPIRDEDGYIYDYETIGDYPRWGEDDPRSNELAEWLIEAYTTRLRSHKLYKDAEATVSLLTITSNVAYSKQTGNSPVHKGVYLNEDGSVNLSKLEFFSPGANPSNKAKGGWLQNLNSLSSLDFSYAADGISLTTQVSPRALGKTRDEQVDNLVTILDGYFENGGQHVNLNVMDLNDVYEKIMSGEDVIVRISGYCVNTKYLTPEQKTELTQRVFHEVLSMDDALDALS

SEQ ID NO: 110 - protein, 448 aa, Streptococcus pneumoniae
  MISC_FEATURE: AnrP674643
MPITAADIRREVKEKNVTFIRLMFSDILGTMKNVEIPATDEQLDKVLSNKVMFDGSSIEGFVRINESDMYLYPDLDTWTVFPWGDENGSVAGLICDVYTTEGEPFAGDPRGNLKRALRHMEEVGFKSFNLGPEPEFFLFKLDENGDPTLEVNDKGGYFDLAPTDLADNTRREIVNVLTKMGFEVEASHHEVAVGQHEIDFKYDEVLRACDKIQIFKLVVKTIARKHGLYATFMAKPKFGIAGSGMHCNMSLFDAEGNNAFFDPNDPKGMQLSETAYHFLGGLIKHAYNYTAIMNPTVNSYKRLVPGYEAPVYIAWAGRNRSPLVRVPASRGMGTRLELRSVDPMANPYVAMAVLLEVGLYGIENKIEAPAPIEENIYIMTAEERKEAGITDLPSTLHNALKALTEDEVVKAALGDHIYTSFLEAKRIEWASYATFVSQWEIDNYLDLY

SEQ ID NO: 111 - protein, 378 aa, Streptococcus pneumoniae
  MISC_FEATURE: AnrP208610
MSYKTSNAEGHVDFINTYDLEPMAQQVIPKAAFGYIASGAEDTFTLRENIRAFNHKLIVPHTLCNVENPSTEIEFAGEKLSSPIIMAPVAAHKLANEQGEVATARGVHEFGSLYTTSSYSTVDLPEISEALQGTPHWFQFYFSKDDGINRHIMDRVKAEGYKAIVLTADATVGGNREVDKRNGFVFPVGMPIVEEYLPEGAGKSMDFVYKSAKQRLSPRDVEFIAEYSGLPVYVKGPQCREDVERSLAAGASGIWVTNHGGRQIDGGPAAFDSLQEVAEAVDRRVPIVFDSGVRRGQHVFKALASGADLVAIGRPVIYGLALGGSVGVRQVFEHLNAELKTVMQLSGTQTIEDVKHFKLRHNPYNPTFPVDPRDLKLY

SEQ ID NO: 112 - protein, 216 aa, Streptococcus pneumoniae
  MISC_FEATURE: AnrP234353
MKEGIPKMGKIEVINHPLIQHKLSILRRTDTSTKAFRELVDEIAMLMGYEVLRDLPLEDVEIETPITKTVQKQLAGKKLAIVPILRAGIGMVDGLLSLVPAAKVGHIGMYRDEETLQPVEYLVKLPEDIDQRQIFVVDPMLATGGSAILAVDSLKKRGASNIKFVCLVSAPEGVKALQEAHPDVEIFTAALDERLNEHGYIVPGLGDAGDRLFGTK

SEQ ID NO: 113 - protein, 403 aa, Streptococcus pneumoniae
  MISC_FEATURE: AnrP665711
MSKFNRIHLVVLDSVGIGAAPDANNFVNAGVPDGASDTLGHISKTVGLNVPNMAKIGLGNIPRETPLKTVAAESNPTGYATKLEEVSLGKDTMTGHWEIMGLNITEPFDTFWNGFPEEILTKIEEFSGRKVIREANKPYSGTAVIYDFGPRQMETGELIIYTSADPVLQIAAHEDIIPLDELYRICEYARSITLERPALLGRIIARPYVGEPGNFTRTANRRDLAVSPFFPTVLDKLNEAGIDTYAVGKINDIFNGAGINHDMGHNKSNSHGIDTLLKTMGLAEFEKGFSFTNLVDFDALYGHRRNAHGYRDCLHEFDERLPEIIAAMRENDLLLITADHGNDPTYAGTDHTREYIPLLAYSPAFKGNGLIPVGHFADISATVADNFGVETAMIGESFLDKLV

SEQ ID NO: 114 - protein, 501 aa, Streptococcus pneumoniae
  MISC_FEATURE: AnrP881257
MNKRVKIVATLGPAVEIRGGKKFGEDGYWGEKLDVEASAKNIAKLIEAGANTFRFNFSHGDHQEQGERMATVKLAEKIAGKKVGFLLDTKGPEIRTELFEGEAKEYSYKTGEKIRVATKQGIKSTREVIALNVAGALDIYDDVEVGRQVLVDDGKLGLRVVAKDDATREFEVEVENDGIIAKQKGVNIPNTKIPFPALAERDNDDIRFGLEQGINFIAISFVRTAKDVNEVRAICEETGNGHVQLFAKIENQQGIDNLDEIIEAADGIMIARGDMGIEVPFEMVPVYQKMIIKKVNAAGKVVITATNMLETMTEKPRATRSEVSDVFNAVIDGTDATMLSGESANGKYPLESVTTMATIDKNAQALLNEYGRLDSDSFERNSKTEVMASAVKDATSSMDIKLVVTLTKTGHTARLISKYRPNADILALTFDELTERGLMLNWGVIPMLTDAPSSTDDMFEIAERKAVEAGLVESGDDIVIVAGVPVGEAVRTNTMRIRTVR

SEQ ID NO: 115 - protein, 406 aa, Streptococcus pneumoniae
  MISC_FEATURE: AnrP171086
MTYPNLLDRFLTYVKVNTRSDEHSTTTPSTQSQVDFATNVLIPEMKRVGLQNVYYLPNGFAIGTLPANDPSLTRKIGFISHMDTADFNAEGVNPQVIENYDGCVIELGNSGFKLDPADFKSLEKYPGQTLITTDGTTLLGADDKSGIAEIMTAIEYLTAHPEIKHCEIRVGFGPDEEIGVGANKFDAEDFDVDFAYTVDGGPLGELQYETFSAAGAELHFQGRNVHPGTAKGQMVNALQLAIDFHNQLPENDRPELTEGYQGFYHLMDVTGSVEEARASYIIRDFEKDAFEARKASMQSIADKMNEELGSNRVTLNLTDQYYNMKEVIEKDMTPITIAKAVMEDLGITPIIEPIRGGTDGSKISFMGIPTPNIFAGGENMHGRFEYVSLQTMERAVDTIIGIVRSL

SEQ ID NO: 116 - protein, 319 aa, Streptococcus pneumoniae
  MISC_FEATURE: AnrP120435
MSDRKNMKLFALNSNQEIAQKIAQAVGVPLGKLSSRQFSDGEIQVNIEESVRGYDVYIIQSTSFPVNNHLMELLIMVDACVRASAHSINVVLPYFGYARQDRIACPREPLTAKLVANMLVKAGVDRILTLDLHAVQVQGFFDIPVDNLFTVPLFAKHYCDKGLLGSDVVVVSPKNSGVKRARSLAEYLDAPIAIIDYPQDDATRNEGYIIGDVEGKKAILIDDILNTGRTFSEASKIVEREGATEIYAVSSHGLFVEGAAELLDNTNIKEILVTDSVATKEKTPKNVCYITASELIGDAIVRIHERKPVSPLFAYNKKK

SEQ ID NO: 117 - protein, 577 aa, Streptococcus pneumoniae
  MISC_FEATURE: AnrP599544
MTEMLKGIAASDGVAVAKAYLLVQPDLSFETITVEDTNAEEARLDAALQASQDELSVIREKAVGTLGEEAAQVFDAHLMVLADPEMISQIKETIRAKKVNAEAGLKEVTDMFITIFEGMEDNPYMQERAADIRDVTKRVLANLLGKKLPNPASINEEVIVIAHDLTPSDTAQLDKNFVKAFVTNIGGRTSHSAIMARTLEIAAVLGTNNITEIVKDGDILAVNGITGEVIINPTDEQAAEFKAAGEAYAKQKAEWALLKDAQTVTADGKHFELAANIGTPKDVEGVNNNGAEAVGLYRTEFLYMDSQDFPTEDEQYEAYKAVLEGMNGKPVVVRTMDIGGDKELPYFDMPHEMNPFLGFRALRISISETGDAMFRTQIRALLRASVHGQLRIMFPMVALLKEFRAAKAVFDEEKANLLAEGVAVADNIQVGIMIEIPAAAMLADQFAKEVDFFSIGTNDLIQYTMAADRMNEQVSYLYQPYNPSILRLINNVIKAAHAEGKWAGMCGEMAGDQQAVPLLVGMGLDEFSMSATSVLRTRSLMKKLDTAKMEEYANRALTECSTMEEVLELQKEYVNFD

SEQ ID NO: 118 - protein, 719 aa, Streptococcus pneumoniae
  MISC_FEATURE: AnrP671474
MGLKHLEDVTYFRLNNEINRPVNGQIMLHKDKEALDAFFKENVVPNTMVFDSIKDKINYLIEHNYIETAFIKKYRPEFLEELAQFIKDQNFQFKSFMAAYKFYNQYALKTNDGEYYLENMEDRVFFNALYFADGNEAVAIDIANEIIHQRYQPATPSFLNAGRARRGELVSCFLIQVTDDMNSIGRSINSALQLSRIGGGVGITLSNLREAGAPIKGYEGAASGVVPVMKLFEDSFSYSNQLGQRQGAGVVYLNVFHPDIIAFLSTKKENADEKVRVKTLSLGVVVPDKFYELARKNEEMYLFSPYSVEKEYGVPFNYIDITEKYDELVANPNIRKTKIKARDLETEISKLQQESGYPYVVNIDTANRANPVDGKIIMSNLCSEILQVQEPSLINDAQEFLQMGTDVSCNLGSTNVVNMMTSPDFGRSIRAMVRALTFVTDSSHIVAVPTIDHGNSQAHTFGLGAMGLHSYLAQQLIEYGSPESVEFTSIYFMLMNYWTLVESNNIARERGITFHNFEKSDYANGSYFDKYVTGEFVPTSDRVKELFKNVFIPGVADWAELRDKVQEDGLYHQNRLAVAPNGSISYINDVSASIHPITQRIEERQEKKIGKIYYPAAGLSTETIPYYTSAYDMDMRKVIDVYAAATEHVDQGLSLTLFMRSDIPKGLYEWKRENKQTTRDLSILRNYAFNKGIKSIYYVRTFTDDGGEVGANQCESCVI

SEQ ID NO: 119 - protein, 448 aa, Streptococcus pneumoniae
  MISC_FEATURE: AnrP144661
MTSAKEYIQSVFETVKARNGHEAEFLQAVEEFFNTLEPVFEKHPEYIEENILARITEPERVVSFRVPWVDRDGKIQVNRGYRVQFNSAVGPYKGGLRFHPTVNQGILKFLGFEQIFKNVLTGLPIGGGKGGSDFDPKGKTDAEVMRFCQSFMTELQKHIGPSLDVPAGDIGVGGREIGYLYGQYKRLNQFDAGVLTGKPLGFGGSLIRPEATGYGLVYYTEEMLKANGNSFAGKKVVISGSGNVAQYALQKATELGATVISVSDSNGYVIDENGIDFDLLVDVKEKRRARLTEYAAEKATATYHEGTVWTYAGNYDIALPCATQNEINGEAAKRLVAQGVICVSEGANMPSDLDAIKVYKENGIFYGPAKAANAGGVAVSALEMSQNSLRLSWTREEVDGRLKDIMTNIFNTAKTTSETYGLDKDYLAGANIAAFENVANAMIAQGIV

SEQ ID NO: 120 - protein, 263 aa, Streptococcus pneumoniae
  MISC_FEATURE: AnrP381397
MSAYQLPTVWQDEASNQGAFTGLNRPTAGARFEQNLPKGEQAFQLYSLGTPNGVKVTILLEELLEAGFKEAAYDLYKIAIMDGDQFGSDFVKLNPNSKIPALLDQSGTENVRVFESAHILLYLAEKFGAFLPSNPVEKVEVLNWLFWQAGAAPFLGGGFGHFFNYAPEKLEYPINRFTMEVKRQLDLLDKELAQKPYIAGNDYTIADIAIWSWYGQLVQGNLYQGSAKFLDASSYQNLVKWAEKIANRPAVKRGLEVTYTEIK

SEQ ID NO: 121 - protein, 252 aa, Streptococcus pneumoniae
  MISC_FEATURE: AnrP649096
MSRKPFIAGNWKMNKNPEEAKAFVEAVASKLPSSDLVEAGIAAPALDLTTVLAVAKGSNLKVAAQNCYFENAGAFTGETSPQVLKEIGTDYVVIGHSERRDYFHETDEDINKKAKAIFANGMLPIICCGESLETYEAGKAAEFVGAQVSAALAGLTAEQVAASVIAYEPIWAIGTGKSASQDDAQKMCKVVRDVVAADFGQEVADKVRVQYGGSVKPENVASYMACPDVDGALVGGASLEAESFLALLDFVK

SEQ ID NO: 122 - protein, 438 aa, Streptococcus pneumoniae
  MISC_FEATURE: AnrP174421
MLTYDLIVIGFGKAGKTLAGKLASAGKKVALVERSKAMYGGTCINIGCIPTKTLLVAAEKDLSFEEVIATKNTITGRLNGKNYTTVAGTGVDIFDAEAHFLSNKVIEIQAGDEKQELTAETIVINTGAVSNVLPIPGLATSKNVFDSTGIQSLDKLPEKLGVLGGGNIGLEFAGLYNKLGSKVTVLDTLDTFLPRAEPSIAALAKQYLEEDGIELLQNIHTTEIKNDGDQVLVVTEDETYRFDALLYATGRKPNVEPLQLENTDIELTERGAIKVDKHCQTNVPGVFAVGDVNGGLQFTYISLDDFRVVYSYLAGDGSYTLEDRLNVPNTMFITPALSQVGLTESQAADLKLPYAVKEIPVAAMPRGHVNGDLRGAFKAVVNTETKEILGASIFSEGSQEIINIITVAMDNKIPYTYFTKQIFTHPTLAENLNDLFAI

SEQ ID NO: 123 - protein, 438 aa, Streptococcus pneumoniae
  MISC_FEATURE: AnrP327251
MLTYDLIVIGFGKAGKTLAGKLASAGKKVALVERSKAMYGGTCINIGCIPTKTLLVAAEKDLSFEEVIATKNTITGRLNGKNYATVAGTGVDIFDAEAHFLSNKVIEIQAGDEKKELTAETIVINTGAVSNVLPIPGLATSKNIFDSTGIQSLDKLPEKLGILGGGNIGLEFAGLYNKLGSKVTVLDALDTFLPRAEPSIAALAKQYMEEDGIELLQNIHTTEIKNDGDQVLVVTEDETYRFDALLYATGRKPNVEPLQLENTDIELTERGAIKVDKHCQTNVPGVFAVGDVNGGLQFTYISLDDFRVVYSYLAGDGSYTLEDRLNVPNTMFITPALSQVGLTESQAADLKLPYAVKEIPVAAMPRGHVNGDLRGAFKAVVNTETKEILGASIFSEGSQEIINIITVAMDNKIPYTYFTKQIFTHPTLAENLNDLFAI

SEQ ID NO: 124 - protein, 283 aa, Streptococcus pneumoniae
  MISC_FEATURE: AnrP23326
MILITGANGQLGTELRYLLDERNEEYVAVDVAEMDITDAEMVEKVFEEVKPTLVYHCAAYTAVDAAEDEGKELDFAINVTGTKNVARASEKHGATLVYISTDYVFDGKKPVGQEWEVDDRPDPQTEYGRTKRMGEELVEKHVSNFYIIRTAWVFGNYGKNFVFTMQNLAKTHKTLTVVNDQYGRPTWTRTLAEFMTYLAENRKEFGYYHLSNDATEDTTWYDFAVEILKDTDVEVKPVDSSQFPAKAKRPLNSTMSLAKAKATGFVIPTWQDALQEFYKQEVR

SEQ ID NO: 125 - protein, 189 aa, Streptococcus pneumoniae
  MISC_FEATURE: AnrP392269
MKKIVLVSLAFLFVLVGCGQKKETGPATKTEKDTLQSALPVIENAEKNTVVTKTLVLPKSDDGSQQTQTITYKDKTFLSLAIQQKRPVSDELKTYIDQHGVEETQKALLEAEEKDKSIIEARKLAGFKLETKLLSATELQTTTSFDFQVLDVKKASQLEHLKNIGLENLLKNEPSKYISDRLANGATEQ

SEQ ID NO: 126 - protein, 227 aa, Streptococcus pneumoniae
  MISC_FEATURE: AnrP758033
MPTLEIAQKKLEFIKKAEEYYNALCTNIQLSGDKLKVISVTSVNPGEGKTTTSVNIARSFARAGYKTLLIDGDTRNSVMSGFFKSREKITGLTEFLSGTADLSHGLCDTNIENLFVVQSGTVSPNPTALLQSKNFNDMIETLRKYFDYIIVDTAPIGIVIDAAIITQKCDASILVTATGEVNKRDVQKAKQQLEQTGKLFLGVVFNKLDISVDKYGVYGFYGNYGKK

SEQ ID NO: 127 - protein, 71 aa, Streptococcus pneumoniae
  MISC_FEATURE: AnrP140539
MAKSNFEKVESVVGWVRDKKITGYRISKETNAREMSIIALAQGRAKVKNISFETALGLIDFYEKNYEKFED

SEQ ID NO: 128 - protein, 56 aa, Streptococcus pneumoniae
  MISC_FEATURE: AnrP527554
MAKGFAKGLVTGVAGTVAAVAGAVYAFKKKVIEPEEQKAAFIEENRKKAARRRVSR

SEQ ID NO: 129 - protein, 103 aa, Streptococcus pneumoniae
  MISC_FEATURE: AnrP199471
MLKPSIDTLLDKVPSKYSLVILEAKRAHELEAGAPATQGFKSEKSTLRALEEIESGNVTIHPDPEGKREAVRRRIEEEKRRKEEEEKKIKEQIAKEKEDGEKI

SEQ ID NO: 130 - protein, 67 aa, Streptococcus pneumoniae
  MISC_FEATURE: AnrP533516
MSVEEKLNQAKGSIKEGVGKAIGDEKMEKEGAAEKVVSKVKEVAEDAKDAVEGAVEGVKNMLSGDDK

SEQ ID NO: 131 - protein, 202 aa, Streptococcus pneumoniae
  MISC_FEATURE: AnrP520183
MSQSSYLSPLLWLKKEADKEKMSATQCQIFFFYYQMFELLFARESDMKDLCLGTKGFYFSQLEKNLLSGVSRFLKNLEGKVTLKANQEVSARKALFLALTTSQSDWQELAPVFDFYQTIGRLENPSLLSSQDRQHLMWIYQSALEKDYIVKVIGDKHFVLKRQDATKLTARQTQTLEILSQSEDLVNPVYVTLGEKGVLLLD

SEQ ID NO: 132 - protein, 178 aa, Streptococcus pneumoniae
  MISC_FEATURE: AnrP209695
MDSFDKGWFVLQTYSGYENKVKENLLQRAQTYNMLDNILRVEIPTQTVQVEKNGKRKEVEENRFPGYVLVEMVMTDEAWFVVRNTPNVTGFVGSHGNRSKPTPLLEQEIRDILVSMGQTVQEFDFDVEIGQTVRIIDGAFADYTGKITEIDNNKVKMIISMFGNDTVAEVNLNQIAEL

SEQ ID NO: 133 - protein, 232 aa, Streptococcus pneumoniae
  MISC_FEATURE: AnrP341409
MTATKMNAQEIIQFIANAEKKTSVKVTFEGQLATAVPSSVVKLGNVLFGDWKDVAPLLEGLVENQDYVVEQDARNSAVPLLDKRAINARIEPGAIIRDQVEIGDNAVIMMGSVINIGAEIGAGTMIDMGAILGGRAIVGKNSHVGAGAVLAGVIEPASAEPVRVGDNVLIGANAVVIEGVQIGSGSVVAAGAIVTQDVPENVVVAGVPARIIKEIDAQTQQKTALEDALRTL

SEQ ID NO: 134 - protein, 103 aa, Streptococcus pneumoniae
  MISC_FEATURE: AnrP456483
MLYNNDKEEISMLKEVLTVAKVAKKSSLFLGGVAFGTLGLKILASKEAKKGYSKALAKAYKLKDELDASVSVVKQHGDDVLQDAKYLYEQEKKEEQLDSLIGE

SEQ ID NO: 135 - protein, 1854 aa, Streptococcus pneumoniae
  MISC_FEATURE: AnrP349465
MKKFFGEKQHRFSLRKLAIGLVSASISSLFFVSIASSGIVFAQENAAVHYKYVTDTELSSQEKDLIVKGIPKITEDSESTYYLVYRMDEKAQLGQLPNTGGQNSLTSVLTGGVLASIGLLIFVVSKKKGKKKALLKVVLITGMGSGLASSVHAIENQLLLQYNQEYQLSQGDSLPLPRALSGYTYLGYIKQDKEINQQETAARDQKFDYTVQPHFQTNEGRQRAGDEQKAPSPTLPADKPIPSQDSSNQNPSGLASVDPQDEVLAGRVNKPELLYKDQEIVTKLDVPELVQENPELTEGTIHVKQEGRAGKKVEVVRIFTVENQEISREVLSTKLEEALPRIVEKGTKKAVVPSEAPQSAKKGEPETQAPLPEYNGNQAGTIVAPEIAEKPEYTGTQAGAVVEPEQVAPLPEYQGTQAGAIVEPEQVEPEVGGVQSGALVEPETADKPTYTGEQSGAIVEPEQVPPTPEYKGTQAGAIVGPETTEKPEYTDTQSGAIVEPETQSSLPEYTGEQSGAIVAPETTEIPEYTGTQAGAVVEPEQVAPLPEYTGNTEQVKPEAPTEKPKEKDPEKTLELRNVSDLELYSQTNGTYKQHVSLDGVPSNPDTYFVKVTSSSFKDVYLPVASITAETKDGQPVYKITAKAEKLQQELENKYVDNFTFYLAKKATEETTTFTSFSNLVKAINQNLSGTYHLAASLNANEVELEPEAKSYIKGTFTGQLIGEKDGKQYAIYNLKKPLFETLSGATVEKLSLKNVSISGKDDIGSLAYEAQNGTKIKQVHVDGVLAGERGIGGLLAKADQSSITESSFKGRIINTYETTAAYNIGGLVGHLTGSRALLTKSKATVAISSNTNSSDQTVGGLAGLVDQDAQIQDSYAEGDINNAKHFGRVAGVAGYLWDRTSNLEKHAGSLTNVLSDINVTNGNAITGYHYNDMKVKDTFSSKANRVYNVTLVKDEVVSKESFEERGTMLDASQIESKKAAINPLTLPIVEPLSTSGKKDSDFSKVDHYQAKRDLAYKNIEKLLPFYNKATIVKYGNLVNENSLLYQKELLSVVMMKDNQVITDIVSNKETANKLLLHYKDHSYEKLNLKYQADFANLAEYSLGNTGLLYTPNQFLYDQSSIIKQVLPDLQKVDYRSEAIRKTLGISPKVEQTELYLEDQFAKTKEHLEDSLKKLLSADAGLAGDNPVTKGYLVDKIKRNKEALLLGLTYLERWYNFSYGQVNVKDLVLYHLDFFGKGNASPLDTLIELGKSGFNNLLAKNNVDTYSISLASHHGTTDLFSTLEHYRKVFLPNTSNNDWFKSETKAYIVEEKSNIAEVKAKQEQAETKYSIGVYDRITSATWKYRNMVLPLLTLPERLVFVISTLSSLGFGAYDRYRNSEHKAGKALNDFVEENARETAKRQRDHYDYWYRILDEQSREKLYRTILLYDAYKFGDDTTSGKATLEAKFDSSNPAMKNFFGPVGNKVVHNQHGAYATGDGVYYMSYRMLDKDGAITYTHEMTHDSDQDIYLGGYGRRSGLGPEFFAKGLLQAPDQPSDATITINSILKHSKSDSTEGSRLQVLDPTERFQNAADLQNYVHNMFDLIYMLEYLEGQSIVNKLNVYQKMAALRKIENKYVKDPADGNEVYATNVVKELTEEEARNLNSFDSLIDHNILSAREYQTGDYERNGYYTIKLFAPIFSALSSEKGTPGDLMGRRIAYELLAAKGFKDGMVPYISNQYEEIAKQKGKTINLYGKERGLVTDDLVLEKVFEGKYASWADFKKAMYKERVDQFKNLKQVTFKDPTKPWPNYTTETINQVSELQALMDQAVLKDAVSPRWSNYNPEYDSAVHKLKRAIFKAYLDQTKDFRTSIFKK

SEQ ID NO: 136 - protein, 833 aa, Streptococcus pneumoniae
  MISC_FEATURE: AnrP648160
MSFYNHKEIEPKWQGYWAEHHTFKTGTDTSKPKFYALDMFPYPSGAGLHVGHPEGYTATDILSRYKRAQGYNVLHPMGWDAFGLPAEQYAMDTGNDPAEFTAENIANFKRQINALGFSYDWDREVNTTDPNYYKWTQWIFTKLYEKGLAYEAEVPVNWVEELGTAIANEEVLPDGTSERGGYPVVRKPMRQWMLKITAYAERLLNDLDELDWSESIKDMQRNWIGKSTGANVTFKVKGTDKEFTVFTTRPDTLFGATFTVLAPEHELVDAITSSEQAEAVADYKHQASLKSDLARTDLAKEKTGVWTGAYAINPVNGKEMPIWIADYVLASYGTGAVMAVPAHDQRDWEFAKQFDLPIVEVLEGGNVEEAAYTEDGLHVNSDFLDGLNKEDAIAKIVAWLEEKGCGQEKVTYRLRDWLFSRQRYWGEPIPIIHWEDGTSTAVPETELPLVLPVTKDIRPSGTGESPLANLTDWLEVTREDGVKGRRETNTMPQWAGSSWYYLRYIDPHNTEKLADEDLLKQWLPVDIYVGGAEHAVLHLLYARFWHKFLYDLGVVPTKEPFQKLFNQGMILGTSYRDHRGALVATDKVEKRDGSFFHVETGEELEQAPAKMSKSLKNVVNPDDVVEQYGADTLRVYEMFMGPLDASIAWSEEGLEGSRKFLDRVYRLITSKEILAENNGALDKVYNETVKAVTEQIESLKFNTAIAQLMVFVNAANKEDKLYVDYAKGFIQLIAPFAPHLAEELWQTVAETGESISYVAWPTWDESKLVEDEIEIVVQIKGKVRAKLMVAKDLSREELQEIALADEKVKAEIDGKEIVKVIAVPNKLVNIVVK

SEQ ID NO: 137 - protein, 474 aa, Streptococcus pneumoniae
  MISC_FEATURE: AnrP782362
MTKANFGVVGMAVMGRNLALNIESRGYTVAIYNRSKEKTEDVIACHPEKNFVPSYDVESFVNSIEKPRRIMLMVQAGPGTDATIQALLPHLDKGDILIDGGNTFYKDTIRRNEELANSGINFIGTGVSGGEKGALEGPSIMPGGQKEAYELVADVLEEISAKAPEDGKPCVTYIGPDGAGHYVKMVHNGIEYGDMQLIAESYDLMQHLLGLSAEDMAEIFTEWNKGELDSYLIEITADILSRKDDEGQDGPIVDYILDAAGNKGTGKWTSQSSLDLGVPLSLITESVFARYISTYKEERVHASKVLPKPAAFNFEGDKAELIEKIRQALYFSKIISYAQGFAQLRVASKENNWNLPFADIASIWRDGCIIRSRFLQKITDAYNRDADLANLLLDEYFLDVTAKYQQAVRDIVALAVQAGVPVPTFSAAITYFDSYRSADLPANLIQAQRDYFGAHTYQRKDKEGTFHYSWYDEK

SEQ ID NO: 138 - protein, 448 aa, Streptococcus pneumoniae
  MISC_FEATURE: AnrP108886
MREYDIIAIGGGSGGIATMNRAGEHGAQAAVIEEKKLGGTCVNVGCVPKKIMWYGAQIAETFHQFGEDYGFKTTDLNFDFATLRRNRESYIDRARSSYDGSFKRNGVDLIEGHAEFVDSHTVSVNGELIRAKHIVIATGAHPSIPNIPGAELGGSSDDVFAWEELPESVAILGAGYIAVELAGVLHTFGVKTDLFVRRDRPLRGFDSYIVEGLVKEMERTNLPLHTHKVPVKLEKTTDGITIHFEDGTSHTASQVIWATGRRPNVKGLQLEKAGVTLNERGFIQVDEYQNTVVEGIYALGDVTGEKELTPVAIKAGRTLSERLFNGKTTAKMDYSTIPTVVFSHPAIGTVGLTEEQAIKEYGQDQIKVYKSSFASMYSACTRNRQESRFKLITAGSEEKVVGLHGIGYGVDEMIQGFAVAIKMGATKADFDATVAIHPTSSEEFVTMR

SEQ ID NO: 139 - protein, 468 aa, Streptococcus pneumoniae
  MISC_FEATURE: AnrP860746
MSSGKIAQVIGPVVDVLFAAGEKLPEINNALVVYKNDERKTKIVLEVALELGDGMVRTIAMESTDGLTRGMEVLDTGRPISVPVGKETLGRVFNVLGDTIDLEAPFTEDAERQPIHKKAPTFDELSTSSEILETGIKVIDLLAPYLKGGKVGLFGGAGVGKTVLIQELIHNIAQEHGGISVFAGVGERTREGNDLYWEMKESGVIEKTAMVFGQMNEPPGARMRVALTGLTIAEYFRDVEGQDVLLFIDNIFRFTQAGSEVSALLGRMPSAVGYQPTLATEMGQLQERITSTKKGSVTSIQAIYVPADDYTDPAPATAFAHLDSTTNLERKLVQLGIYPAVDPLASSSRALAPEIVGEEHYAVAAEVKRVLQRYHELQDIIAILGMDELSDEEKTLVARARRIQFFLSQNFNVAEQFTGQPGSYVPVAETVRGFKEILDGKYDHLPEDAFRGVGSIEDVIAKAEKMGF

SEQ ID NO: 140 - protein, 501 aa, Streptococcus pneumoniae
  MISC_FEATURE: AnrP566006
MAINAQEISALIKQQIENFKPNFDVTETGVVTYIGDGIARAHGLENVMSGELLNFENGSYGMAQNLESTDVGIIILGDFTDIREGDTIRRTGKIMEVPVGESLIGRVVDPLGRPVDGLGEIHTDKTRPVEAPAPGVMQRKSVSEPLQTGLKAIDALVPIGRGQRELIIGDRQTGKTTIAIDTILNQKDQDMICIYVAIGQKESTVRTQVETLRQYGALDYTIVVTASASQPSPLLFLAPYAGVAMAEEFMYQGKHVLIVYDDLSKQAVAYRELSLLLRRPPGREAFPGDVFYLHSRLLERSAKVSDELGGGSITALPFIETQAGDISAYIATNVISITDGQIFLGDGLFNAGIRPAIDAGSSVSRVGGSAQIKAMKKVAGTLRIDLASYRELEAFTKFGSDLDAATQAKLNRGRRTVEVLKQPVHKPLPVEKQVTILYALTHGFLDTVPVDDIVRFEEEFHAFFDAQHPEILETIRDTKDLPEEAVLDAAITEFLNQSSFQ

SEQ ID NO: 141 - protein, 339 aa, Streptococcus pneumoniae
  MISC_FEATURE: AnrP50583
MQEKILVTGGAGFIGTHTVIELIQAGHQVVVVDNLVNSNRKSLEVVEGITGVEIPFYEADIRDTDTLRDIFKQEEPTGVIHFAGLKAVGESTRIPLAYYDNNIAGTVSLLKAMEENNCKNIIFSSSATVYGDPHTVPILEDFPLSVTNPYGRTKLMLEEILTDIYKADSEWNVVLLRYFNPIGAHESGDLGENPNGIPNNLLPYVTQVAVGKLEQVQVFGDDYDTEDGTGVRDYIHVVDLAKGHVAALKKIQKGSGLNVYNLGTGKGYSVLEIIQNMEKAVGRPIPYRIVERRPGDIAACYSDPAKAKAELGWEAELDITQMCEDAWRWQSKHPNGFED

SEQ ID NO: 142 - protein, 242 aa, Streptococcus pneumoniae
  MISC_FEATURE: AnrP309124
MIEYKNVALRYTEKDVLRDVNLQIEDGEFMVLVGPSGSGKTTMLKMINRLLEPTDGNIYMDGKRIKDYDERELRLSTGYVLQAIALFPNLTVAENIALIPEMKGWSKEEITKKTEELLAKVGLPVAEYGHRLPSELSGGEQQRVGIVRAMIGQPKIFLMDEPFSALDAISRKQLQVLTKELHKEFGMTTIFVTHDTDEALKLADRIAVLQDGEIRQVANPETILKAPATDFVADLFGGSVHD

SEQ ID NO: 143 - protein, 308 aa, Streptococcus pneumoniae
  MISC_FEATURE: AnrP476264
MSEKLVEIKDLEISFGEGSKKFVAVKNANFFINKGETFSLVGESGSGKTTIGRAIIGLNDTSNGDIIFDGQKINGKKSREQAAELIRRIQMIFQDPAASLNERATVDYIISEGLYNHRLFKDEEERKEKVQNIIREVGLLAEHLTRYPHEFSGGQRQRIGIARALVMQPDFVIADEPISALDVSVRAQVLNLLKKFQKELGLTYLFIAHDLSVVRFISDRIAVIYKGVIVEVAETEELFNNPIHPYTQALLSAVPIPDPILERKKVLKVYDPSQHDYETDKPSMVEIRPGHYVWANQAELARYQKGLN

SEQ ID NO: 144 - protein, 338 aa, Streptococcus pneumoniae
  MISC_FEATURE: AnrP157536
MTNSVFQGRSFLAEKDFTRAELEYLIGLSAHLKDLKKRNIQHHYLAGKNIALLFEKTSTRTRAAFTTAAIDLGAHPEYLGANDIQLGKKESTEDTAKVLGRMFDGIEFRGFSQRMVEELAEFSGVPVWNGLTDEWHPTQMLADYLTVQENFGRLEGLTLVYCGDGRNNVANSLLVTGAILGVNVHIFSPKELFPEKEIVELAEGFAKESGAHVLITEDADEAVKDADVLYTDVWVSMGEEDKFAERVALLKPYQVNMDLVKKAGNENLIFLHCLPAFHDTHTVYGKDVAEKFGVEEMEVTDEVFRSKYARHFDQAENRMHTIKAVMAATLGNLYIPKV

SEQ ID NO: 145 - protein, 238 aa, Streptococcus pneumoniae
  MISC_FEATURE: AnrP555111
MGRKWANIVAKKTAKDGANSKVYAKFGVEIYVAAKKGDPDPESNSALKFVIDRAKQAQVPKHIIDKAIDKAKGNTDETFTEGRYEGFGPNGSMLIVDTLTSNVNRTAANVRAAFGKNGGNMGASGSVSYLFDNKGVIVFGGEDADAVFEQLLEADVDVDDVEAQEGTITVYTAPTDLHKAIVALRESGIEEFQVTELEMIPQSEVELSGEDLETFEKLYSVLEDDEDVQKIYTNVDGF

SEQ ID NO: 146 - protein, 396 aa, Streptococcus pneumoniae
  MISC_FEATURE: AnrP166919
MTKTIAINAGSSSLKWQLYLMPEEKVLAKGLIERIGLKDSISTVKFDGRSEQQILDIENHIQAVKILLDDLIRFDIIKAYDEITGVGHRVVAGGEYFKESTVVEGDVLEKVEELSLLAPLHNPANAAGVRAFKELLPDITSVVVFDTSFHTSMPEKAYRYPLPTKYYTENKVRKYGAHGTSHQFVAGEAAKLLGRPLEDLKLITCHIGNGGSITAVKAGKSVDTSMGFTPLGGIMMGTRTGDIDPAIIPYLMQYTEDFNTPEDISRVLNRESGLLGVSANSSDMRDIEAAVAEGNHEASLAYEMYVDRIQKHIGQYLAVLNGADAIVFTAGVGENAESFRRDVISGISWFGCDVDDEKNVFGVTGDISTEAAKIRVLVIPTDEELVIARDVERLKK

SEQ ID NO: 147 - protein, 658 aa, Streptococcus pneumoniae
  MISC_FEATURE: AnrP691494
MSNLSVNAIRFLGIDAINKANSGHPGVVMGAAPMAYSLFTKQLHINPAQPNWINRDRFILSAGHGSMLLYALLHLSGFEDVSMDEIKSFRQWGSKTPGHPEFGHTAGIDATTGPLGQGISTATGFAQAERFLAAKYNREGYNIFDHYTYVICGDGDLMEGVSSEAASYAGLQKLDKLVVLYDSNDINLDGETKDSFTESVRDRYNAYGWHTALVENGTDLEAIHAAIETAKASGKPSLIEVKTVIGYGSPNKQGTNAVHGAPLGADETASTRQALGWDYEPFEIPEQVYADFKEHVADRGASAYQAWTKLVADYKEAHPELAAEVEAIIDGRDPVEVTPADFPALENGFSQATRNSSQDALNVVAAKLPTFLGGSADLAHSNMTYIKTDGLQDDANRLNRNIQFGVREFAMGTILNGMALHGGLRVYGGTFFVFSDYVKAAVRLSALQGLPVTYVFTHDSIAVGEDGPTHEPVEHLAGLRAMPNLNVFRPADARETQAAWYLAVTSEKTPTALVLTRQNLTVEDGTDFDKVAKGAYVVYENAADFDTILIATGSEVNLAVSAAKELASQGEKIRVVSMPSTDVFDKQDAAYKEEILPNAVRRRVAVEMGASQNWYKYVGLDGAVLGIDTFGASAPAPKVLAEYGFTVENLVKIVRNLK

SEQ ID NO: 148 - protein, 752 aa, Streptococcus pneumoniae
  MISC_FEATURE: AnrP105992
MLSLQEFVQNRYNKTIAECSNEELYLALLNYSKLASSQKPVNTGKKKVYYISAEFLIGKLLSNNLINLGLYDDVKKELAAAGKDLIEVEEVELEPSLGNGGLGRLAACFIDSIATLGLNGDGVGLNYHFGLFQQVLKNNQQETIPNAWLTEQNWLVRSSRSYQVPFADFTLTSTLYDIDVTGYETATKNRLRLFDLDSVDSSIIKDGINFDKTDIARNLTLFLYPDDSDRQGELLRIFQQYFMVSNGAQLIIDEAIEKGSNLHDLADYAVVQINDTHPSMVIPELIRLLTARGIELDEAISIVRSMTAYTNHTILAEALEKWPLEFLQEVVPHLVPIIEELDRRVKAEYKDPAVQIIDESGRVHMAHMDIHYGYSVNGVAALHTEILKNSELKAFYDLYPEKFNNKTNGITFRRWLMHANPRLSHYLDEILGDGWHHEADELEKLLSYEDKAAVKEKLESIKAHNKRKLARHLKEHQGVEINPNSIFDIQIKRLHEYKRQQMNALYVIHKYLDIKAGNIPARPITIFFGGKAAPAYTIAQDIIHLILCMSEVIANDPAVAPHLQVVMVENYNVTAASFLIPACDISEQISLASKEASGTGNMKFMLNGALTLGTMDGANVEIAELVGEENIYIFGEDSETVIDLYAKAAYKSSEFYAREAIKPLVDFIVSDAVLAAGNKERLERLYNELINKDWFMTLLDLEDYIKVKEQMLADYEDRDAWLDKVIVNISKAGFFSSDRTIAQYNEDIWHLN

SEQ ID NO: 149 - protein, 315 aa, Streptococcus pneumoniae
  MISC_FEATURE: AnrP796530
MANRKIVVALGGNAILSSDPSAKAQQEALVETAKHLVKLIKNGDDLIITHGNGPQVGNLLLQHLASDSEKNPAFPLDSLVAMTEGSIGFWLKNALQNALLDEGIEKNVASVVTQVVVDKNDPAFVNLSKPIGPFYSEEEAKAEAEKSGATFKEDAGRGWRKVVASPKPVDIKEIETIRTLLNNGQVVVAAGGGGIPVVKENNGHLTGVEAVIDKDFASQRLAELVDADLFIVLTGVDYVFVNYNKPNQEKLEHVNVAQLEEYIKQDQFAPGSMLPKVEAAIAFVNGRPEGKAVITSLENLGALIESESGTIIEKG

SEQ ID NO: 150 - protein, 502 aa, Streptococcus pneumoniae
  MISC_FEATURE: AnrP693335
MSQEKYIMAIDQGTTSSRAIIFNKKGEKVSSSQKEFTQIFPQAGWVEHNANEIWNSVQSVIAGAFIESGVKPNQIEAIGITNQRETTVVWDKKTGLPIYNAIVWQSRQTAPLAEQLKSQGYVEKFHEKTGLIIDAYFSATKVRWILDHVEGAQERAEKGELLFGTIDTWLVWKLTDGAAHVTDYSNAARTMLYNIKELKWDDEILEILNIPKAILPEVRSNSEIYGKTAPFHFYGGEVPISGMAGDQQAALFGQLAFEPGMVKNTYGTGSFIIMNTGEEMQLSENNLLTTIGYGINGKVYYALEGSIFIAGSAIQWLRDGLRMVENSPESEKYARDSHNNDEVYVVPAFTGLGAPYWNQNARGSVFGLTRGTSKEDFIKATLQSIAYQVRDIIDTMQVDTQTAIQVLKVDGGAAMNNFLMQFQADILGIDIARAKNLETTALGAAFLAGLSVGYWKDLDELKLLNETGELFEPSMNESRKEQLYKGWKKAVKATQVFAEVDD

SEQ ID NO: 151 - protein, 492 aa, Streptococcus pneumoniae
  MISC_FEATURE: AnrP94921
MSNWDTKFLKKGFTFDDVLLIPAESHVLPNDADLTTKLADNLTLNIPIITAAMDTVTESQMAIAIARAGGLGVIHKNMSIAQQADEVRKVKRSENGVIIDPFFLTPEHTIAEADELMGRYRISGVPVVETLENRKLVGILTNRDLRFISDYNQPISNHMTSENLVTAPVGTDLATAESILQEHRIEKLPLVDEEGSLSGLITIKDIEKVIEFPNAAKDEFGRLLVAGAVGVTSDTFERAEALFEAGADAIVIDTAHGHSAGVLRKIAEIRAHFPDRTLIAGNIATAEGARALYEAGVDVVKVGIGPGSICTTRVIAGVGVPQVTAIYDAAAVAREYGKTIIADGGIKYSGDIVKALAAGGNAVMLGSMFAGTDEAPGETEIFQGRKFKTYRGMGSIAAMKKGSSDRYFQGSVNEANKLVPEGIEGRVAYKGAAADIVFQMIGGIRSGMGYCGAANLKELHDNAQFIEMSGAGLKESHPHDVQITNEAPNYSM

SEQ ID NO: 152 - protein, 428 aa, Streptococcus pneumoniae
  MISC_FEATURE: AnrP109912
MTSVVVVGTQWGDEGKGKITDFLSANAEVIARYQGGDNAGHTIVIDGKKFKLHLIPSGIFFPEKISVIGNGMVVNPKSLVKELSYLHEEGVTTDNLRISDRAHVILPYHIELDRLQEEAKGDNKIGTTIKGIGPAYMDKAARVGIRIADLLDKDIFRERLERNLAEKNRLFEKLYDSKAIVFDDIFEEYYEYGQQIKKYVIDTSVILNDALDNGKRVLFEGAQGVMLDIDQGTYPFVTSSNPVAGGVTIGSGVGPSKIDKVVGVCKAYTSRVGDGPFPTELFDEVGERIREVGHEYGTTTGRPRRVGWFDSVVMRHSRRVSGITNLSLNSIDVLSGLDTVKICVAYDLDGQRIDYYPASLEQLKRCKPIYEELPGWSEDITGVRNLEDLPENARNYVRRVSELVGVRISTFSVGPGREQTNILESVWS

SEQ ID NO: 153 - protein, 322 aa, Streptococcus pneumoniae
  MISC_FEATURE: AnrP317174
MSFSDLKLFALSSNKELAERVAQEIGIELGKSSVRQFSDGEIQVNIEESIRGKHVFILQSTSSPVNDNLLEILIMVDALKRASAESVNVVMPYYGYARQDRKARAREPITSKLVANMLEVAGVDRLLTIDLHAAQIQGFFDIPVDHLMGAPLIADYFERRGMVGSDYVVVSPDHGGVTRARKLAEFLKTSIAIIDKRRSVDKMNTSEVMNIIGKVEGKTCILIDDMIDTAGTICHAADALAEAGAVEVYASCTHPVLSGPATDNIQKSAIKKLVVLDTIYLPEERLIDKIEQISIAHLLGDAIVRIHEKRPLSPLFDIEKKI

SEQ ID NO: 154 - protein, 367 aa, Streptococcus pneumoniae
  MISC_FEATURE: AnrP180141
MYDYLIVGAGLFGAVFAHESALKGKKVKVIEKRNHIAGNIYTREEEGIQVHQYGAHIFHTSDKEIWDYVNQFAEFNRYTNSPVANYKGEIYNLPFNMNTFNKLWGVVTPAEAQAKIEEQRAILNGKTPENLKEQAISLVGTDIYEKLIKDYTEKQWGKPTTNFHPLLFRRLPVHLTYDNNYFNDTYQGIQLGGYTQIVEKMLDYENIDVETNVISLWTKEQYLEDFPKIVLTGMIDEFFDYKLAELEYRSLRFENETLDMENYQGNAVVNYTDAETPYTRIIEHKHFEFGSQAKTIITKEHSKTWEKGDEPYYPVNNDRNNHLYKSYKKFADEQGNVIFGGRLGHYRYYDMHQVIGAALQCVRNELD

SEQ ID NO: 155 - protein, 349 aa, Streptococcus pneumoniae
  MISC_FEATURE: AnrP786510
MTEYKNIIVTGGAGFIGSNFVHYVYENFPDVHVTVLDKLTYAGNRANIEEILGNRVELVVGDIADAELVDKLAAQADAIVHYAAESHNDNSLNDPSPFIHTNFIGTYTLLEAARKYDIRFHHVSTDEVYGDLPLREDLPGHGEGPGEKFTAETKYNPSSPYSSTKAASDLIVKAWVRSFGVKATISNCSNNYGPYQHIEKFIPRQITNILSGIKPKLYGEGKNVRDWIHTNDHSSGVWTILTKGQIGETYLIGADGEKNNKEVLELILKEMGQAADAYDHVTDRAGHDLRYAIDASKLRDELGWKPEFTNFEAGLKATIKWYTDNQEWWKAEKEAVEANYAKTQEIITV

SEQ ID NO: 156 - protein, 444 aa, Streptococcus pneumoniae
  MISC_FEATURE: AnrP282312
MNAIQESFTDKLFANYEANVKYQAIENAASHNGIFAALERRQSHVDNTPVFSLDLTKDKVTNQKASGRCWMFAALNTFRHKLISQYKLENFELSQAHTFFWDKYEKSNWFLEQVIATSDQELTSRKVSFLLQTPQQDGGQWDMVVSLFEKYGVVPKSVYPESVSSSSSRELNAILNKLLRQDAQILRDLLVSGADQATVQAKKEDLLQEIFNFLAMSLGLPPRKFDFAYRDKDNNYKSEKGITPQEFYKKYVNLPLEDYVSVINAPTADKPYGKSYTVEMLGNVVGSRAVRYINVPMERLKELAIAQMQAGETVWFGSDVGQLSNRKAGILATDVYDFESSMDIKLTQDKAGRLDYSESLMTHAMVLTGVDLDENGKSTKWKVENSWGDKVGTDGYFVASDAWMDEYTYQIVVRKELLTAEEQAAYGAEPIVLAPWDPMGALAE

SEQ ID NO: 157 - protein, 398 aa, Streptococcus pneumoniae
  MISC_FEATURE: AnrP392889
MAKLTVKDVDLKVKKVLVRVDFNVPLKDGVITNDNRITAALPTIKYIIEQGGRAILFSHLGRVKEEADKEGKSLAPVAADLAAKLGQDVVFPGVTRGAKLEEAINALEDGQVLLVENTRFEDVDGKKESKNDEELGKYWASLGDGIFVNDAFGTAHRAHASNVGISANVEKAVAGFLLENEIAYIQEAVETPERPFVAILGGSKVSDKIGVIENLLEKADKVLIGGGMTYTFYKAQGIEIGNSLVEEDKLDVAKDLLEKSNGKLILPVDSKEANAFAGYTEVRDTEGEAVSEGFLGLDIGPKSIAKFDEALTGAKTVVWNGPMGVFENPDFQAGTIGVMDAIVKQPGVKSIIGGGDSAAAAINLGRADKFSWISTGGGASMELLEGKVLPGLAALTEK

SEQ ID NO: 158 - protein, 293 aa, Streptococcus pneumoniae
  MISC_FEATURE: AnrP197227
MAIVSAEKFVQAARDNGYAVGGFNTNNLEWTQAILRAAEAKKAPVLIQTSMGAAKYMGGYKVARNLIANLVESMGITVPVAIHLDHGHYEDALECIEVGYTSIMFDGSHLPVEENLKLAKEVVEKAHAKGISVEAEVGTIGGEEDGIIGKGELAPIEDAKAMVETGIDFLAAGIGNIHGPYPVNWEGLDLDHLQKLTEALPGFPIVLHGGSGIPDEQIQAAIKLGVAKVNVNTECQIAFANATRKFARDYEANEAEYDKKKLFDPRKFLADGVKAIQASVEERIDVFGSEGKA

SEQ ID NO: 159 - protein, 311 aa, Streptococcus pneumoniae
  MISC_FEATURE: AnrP262285
MVSTKTQIAGFEFDNCLMNAAGVACMTIEELEEVKNSAAGTFVTKTATLDFRQGNPEPRYQDVPLGSINSMGLPNNGLDYYLDYLLDLQEKESNRTFFLSLVGMSPEETHTILKKVQESDFRGLTELNLSCPNVPGKPQIAYDFETTDRILAEVFAYFTKPLGIKLPPYFDIVYFDQAAAIFNKYPLKFVNCVNSIGNGLYIEDESVVIRPKNGFGGIGGEYIKPTALANVHAFYQRLNPQIQIIGTGGVLTGRDAFEHILCGASMVQVGTTLHKEGVSAFDRITNELKAIMVEKGYESLEDFRGKLRYID

SEQ ID NO: 160 - protein, 332 aa, Streptococcus pneumoniae
  MISC_FEATURE: AnrP274973
MTIMSIGIIIASHGEFAAGIHQSGSMIFGEQEKVQVVTFMPNEGPDDLYAKFNNAVAAFDAEDEVLVLADLWSGSPFNQASRVMGENPERKFAIITGLNLPMLIQAYTERLMDAAAGVEKVAANIIKEAKDGIKALPEELNPVEEVASAAAAPVAQTAIPEGTVIGDGKLKINLARLDTRLLHGQVATAWTPDSKANRIIVASDNVAKDDLRKELIKQAAPGNVKANVVPIQKLIEISKDPRFGETHALILFETPQDALRAIEGGVPIKTLNVGSMAHSTGKTLVNTVLSMDKEDVATFEKMRDLGVEFDVRKVPNDSKKDLFDLINKANVK

SEQ ID NO: 161 - protein, 305 aa, Streptococcus pneumoniae
  MISC_FEATURE: AnrP178361
MKDLTKYKGVIPAFYACYDENGEISQDRVKSLVQYFIDKGVKGIYVNGSSGECIYQSVEDRKQIIEAVMEVAKGKLTVINHIACNNTKDSIELAKHSESVGVDAIAAIPPIYFKLPEYSIAAYWNAMSEAASNTDFIIYNIPQLAGVALTGSLYATMRQNPRVIGVKNSSMPVQDIQMFVAAGGEDYIVFNGPDEQYLGGRLMGAEAGIGGTYGVMPDLFLKLESLIQERDLDTAKKLQYAINEVIYKMISGKANMYAVAKEVLRLNEKLDLGSVRQPLEALAEGDLEVAKQAAELIQQARKEFL

SEQ ID NO: 162 - protein, 1659 aa, Streptococcus pneumoniae
  MISC_FEATURE: AnrP260458
MKNPFFERRCRYSIRKLSVGACSLMIGAVLFAGPALAEETAVPENSGANTELVSGESEHSTNEADKQNEGEHARENKLEKAEGVAIASETASPASNEAATTETAEAASAAKPEEKASEVVAETPSAEAKPKSDKETEAKPEATNQGDESKPAAEANKTEKEVQPDVPKNTEKTLKPKEIKFNSWEELLKWEPGAREDDAINRGSVVLASRRTGHLVNEKASKEAKVQALSNTNSKAKDHASVGGEEFKAYAFDYWQYLDSMVFWEGLVPTPDVIDAGHRNGVPVYGTLFFNWSNSIADQERFAEALKQDADGSFPIARKLVDMAKYYGYDGYFINQETTGDLVKPLGEKMRQFMLYSKEYAAKVNHPIKYSWYDAMTYNYGRYHQDGLGEYNYQFMQPEGDKVPADNFFANFNWDKAKNDYTIATANWIGRNPYDVFAGLELQQGGSYKTKVKWNDILDENGKLRLSLGLFAPDTITSLGKTGEDYHKNEDIFFTGYQGDPTGQKPGDKDWYGIANLVADRTPAVGNTFTTSFNTGHGKKWFVDGKVSKDSEWNYRSVSGVLPTWRWWQTSTGEKLRAEYDFTDAYNGGNSLKFSGDVAGKTDQDVRLYSTKLEVTEKTKLRVAHKGGKGSKVYMAFSTTPDYKFDDADAWKELTLSDNWTNEEFDLSSLAGKTIYAVKLFFEHEGAVKDYQFNLGQLTISDNHQEPQSPTSFSVVKQSLKNAQEAEAVVQFKGNKDADFYEVYEKDGDSWKLLTGSSSTTIYLPKVSRSASAQGTTQELKVVAVGKNGVRSEAATTTFDWGMTVKDTSLPKPLAENIVPGATVIDSTFPKTEGGEGIEGMLNGTITSLSDKWSSAQLSGSVDIRLTKPRTVVRWVMDHAGAGGESVNDGLMNTKDFDLYYKDADGEWKLAKEVRGNKAHVTDITLDKPITAQDWRLNVVTSDNGTPWKAIRIYNWKMYEKLDTESVNIPMAKAAARSLGNNKVQVGFADVPAGATITVYDNPNSQTPLATLKSEVGGDLASAPLDLTNQSGLLYYRTQLPGKEISNVLAVSVPKDDRRIKSVSLETGPKKTSYAEGEDLDLRGGVLRVQYEGGTEDELIRLTHAGVSVSGFDTHHKGEQNLTLQYLGQPVNANLSVTVTGQDEASPKTILGIEVSQEPKKDYLVGDSLDLSEGRFAVAYSNDTMEEHSFTDEGVEISGYDAQKTGRQTLTLHYQGHEVSFDVLVSPKAALNDEYLKQKLAEVEAAKNKVVYNFASSEVKEAFLKAIEAAEQVLKDHETSTQDQVNDRLNKLTEAHKALNGQEKFTEEKTELDRLTGEVQELLAAKPNHPSGSALAPLLEKNKALVEKVDLSPEELTTAKQSLKDLVALLKEDKPAVFSDSKTGVEVHFSNKEKTVIKGLKVERVQASAEEKKYFAGEDAHVFEIEGLDEKGQDVDLSYASIVKIPIEKDKKVKKVFFLPEGKEAVELAFEQTDSHVIFTAPHFTHYAFVYESAEKPQPAKPAPQNTVLPKPTYQPTSDQQKAPKLEVQEEKVAFHRQEHENTEMLVGEQRVIIQGRDGLLRHVFEVDENGQRRLRSTEVIQEAIPEIVEIGTKVKTVPAVVATQEKPAQNTAVKSEEASKQLPNTGTADANEALIAGLASLGLASLALTLRRKREDKD

SEQ ID NO: 163 - protein, 659 aa, Streptococcus pneumoniae
  MISC_FEATURE: AnrP296493
MKKNRVFATAGLVLLAAGVLAACSSSKSSDSSAPKAYGYVYTADPETLDYLISRKNSTTVVTSNGIDGLFTNDNYGNLAPAVAEDWEVSKDGLTYTYKIRKGVKWFTSDGEEYAEVTAKDFVNGLKHAADKKSEAMYLAENSVKGLADYLSGTSTDFSTVGVKAVDDYTLQYTLNQPEPFWNSKLTYSIFWPLNEEFETSKGSDFAKPTDPTSLLYNGPFLLKGLTAKSSVEFVKNEQYWDKENVHLDTINLAYYDGSDQESLERNFTSGAYSYARLYPTSSNYSKVAEEYKDNIYYTQSGSGIAGLGVNIDRQSYNYTSKTTDSEKVATKKALLNKDFRQALNFALDRSAYSAQINGKDGAALAVRNLFVKPDFVSAGEKTFGDLVAAQLPAYGDEWKGVNLADGQDGLFNADKAKAEFAKAKKALEADGVQFPIHLDVPVDQASKNYISRIQSFKQSVETVLGVENVVVDIQQMTSDEFLNITYYAANASSEDWDVSGGVSWGPDYQDPSTYLDILKTTSSETTKTYLGFDNPNSPSVVQVGLKEYDKLVDEAAKETSDLNVRYEKYAAAQAWLTDSSLFIPAMASSGAAPVLSRIVPFTGASAQTGSKGSDVYFKYLKLQDKAVTKEEYEKAREKWLKEKAESNEKAQKELASHVK

SEQ ID NO: 164 - protein, 444 aa, Streptococcus pneumoniae
  MISC_FEATURE: AnrP494895
MSQSYINVIGAGLAGSEAAYQIAERGIPVKLYEMRGVKSTPQHKTDNFAELVCSNSLRGDALTNAVGLLKEEMRRLGSVILESAEATRVPAGGALAVDRDGFSQMVTEKVANHPLIEVVRDEITELPTDVITVIATGPLTSDALAEKIHALNDGDGFYFYDAAAPIIDVNTIDMSKVYLKSRYDKGEAAYLNAPMTKQEFMDFHEALVNAEEAPLNSFEKEKYFEGCMPIEVMAKRGIKTMLYGPMKPVGLEYPDDYTGPRDGEFKTPYAVVQLRQDNAAGSLYNIVGFQTHLKWGEQKRVFQMIPGLENAEFVRYGVMHRNSYMDSPNLLEQTYRSKKQPNLFFAGQMTGVEGYVESAASGLVAGINAARLFKEESEVIFPETTAIGSLAHYITHADSKHFQPMNVNFGIIKELEGERIRDKKARYEKIAERALADLEEFLTV

SEQ ID NO: 165 - protein, 551 aa, Streptococcus pneumoniae
  MISC_FEATURE: AnrP571567
MSEKSREEEKLSFKEQILRDLEKVKGYDEVLKEDEAVVRTPANEPSTEELMADSLSTVEEIMRKAPTVPTHPSQGVPASPADEIQRETPGVPSHPSQDVPSSPAEESGSRPGPGPVRPKKLEREYNETPTRVAVSYTTAEKKAEQAGPETPTPATETVDIIRDTSRRSRREGAKPVKPKKEKKSHVKAFVISFLVFLALLSAGGYFGYQYVLDSLLPIDANSKKYVTVGIPEGSNVQEIGTTLEKAGLVKHGLIFSFYAKYKNYTDLKAGYYNLQKSMSTEDLLKELQKGGTDEPQEPVLATLTIPEGYTLDQIAQAVGQLQGDFKESLTAEAFLAKVQDETFISQAVAKYPTLLESLPVKDSGARYRLEGYLFPATYSIKESTTIESLIDEMLAAMDKNLSPYYSTIKSKNLTVNELLTIASLVEKEGAKTEDRKLIAGVFYNRLNRDMPLQSNIAILYAQGKLGQNISLAEDVAIDTNIDSPYNVYKNVGLMPGPVDSPSLDAIESSINQTKSDNLYFVADVTEGKVYYANNQEDHDRNVAEHVNSKLN

SEQ ID NO: 166 - protein, 202 aa, Streptococcus pneumoniae
  MISC_FEATURE: AnrP618213
MSNEKNTNTNVEKKDATVVAHEIKGELTYEDKVIQKIIGLSLENVSGLLGIDGGFFSNLKEKIVNSDDVTSGVNVEVGKTQVAVDLNVIVEYQKNVPALYSEIREIVSSEVAKMTDLEIVEINVNVVDIKTKEQHEADSVSLQDRVSDVAESTGEFTSEQFEKAKSGLGSGFSTVQEKVSEGVEAVKGAANGVVSHENTRVN

SEQ ID NO: 167 - protein, 232 aa, Streptococcus pneumoniae
  MISC_FEATURE: AnrP628331
MPQISKEALIEQIKDGIIVSCQALPHEPLYTEAGGVIPLLVKAAEQGGAVGIRANSVRDIKEIKEVTKLPIIGIIKRDYPPQEPFITATMKEVDELAELDIEVIALDCTKRERYDGLEIQEFIRQVKEKYPNQLLMADTSIFEEGLAAVEAGIDFVGTTLSGYTSYSPKVDGPDFELIKKLCDAGVDVIAEGKIHTPEQAKQILEYGVRGIVVGGAITRPKEITERFVASLK

SEQ ID NO: 168 - protein, 739 aa, Streptococcus pneumoniae
  MISC_FEATURE: AnrP662295
MFASKSERKVHYSIRKFSIGVASVVVASLVMGSVVHATENEGITQVATSYNKANESQTEHRKAAKQVDEDIKKMLSEIQEYIKKMLSEIQLDKRKHTQNVNLNRKLSAIQTKYLYELRVLKEKSKKEELTSKTKKELDAAFEKFKKEPELTKKLAEAKQKAKAQKEEDFRNYPTNTYKTLELEIAEFDVKVKEAELELVKEEAKPRNEEKIKQAKAKVESKKAEATRLEEIKTERKKAEEEAKRKAEESEKKAAEAKQKVDTKEQGKPKRRAKRGVSGELATPDKKENDAKSSDSSVGEETLPSPSLNMANESQTEHRKDVDEYIKKMLSEIQLDRRKHTQNVNLNIKLSAIKTKYLYELSVLKENSKKEELTSKTKAELTAAFEQFKKDTLKPEKKVAEAEKKVEEAKKKAKDQKEEDRRNYPTNTYKTLELEIAESDVKVKKAELELVKEEANESRNEEKIKQAKEKVESKKAEATRLEKIKTDRKKAEEEAKRKAEESEKKAAEAKQKVDAEEYALEAKIAELEYEVQRLEKELKEIDESDSEDYLKEGLRAPLQSKLDTKKAKLSKLEELSDKIDELDAEIAKLEVQLKDAEGNNNVEAYFKEGLEKTTAEKKAELEKAEADLKKAVDEPETPAPAPQPAPAPEKPAEKPAPAPAPEKPAPAPEKPAEKPAEKPAEEPAEKPAPAPEKPAPTPEKPAPTPETPKTGWKQENGMWYFYNTDGSMATGWLQNNGSWY

SEQ ID NO: 169 - protein, 308 aa, Streptococcus pneumoniae
  MISC_FEATURE: AnrP72010
MKKDELFEGFYLIKSADLRQTRAGKNYLAFTFQDDSGEIDGKLWDAQPHNIEAFTAGKVVHMKGRREVYNNTPQVNQITLRLPQAGEPNDPADFKVKSPVDVKEIRDYMSQMIFKIENPVWQRIVRNLYTKYDKEFYSYPAAKTNHHAFETGLAYHTATMVRLADAISEVYPQLNKSLLYAGIMLHDLAKVIELTGPDQTEYTVRGNLLGHIALIDSEITKTVMELGIDDTKEEVVLLRHVILSHHGLLEYGSPVRPRIMEAEIIHMIDNLDASMMMMSTALALVDKGEMTNKIFAMDNRSFYKPDLD

SEQ ID NO: 170 - protein, 659 aa, Streptococcus pneumoniae
  MISC_FEATURE: AnrP7572
MKKNRVFATAGLVLLAAGVLAACSSSKSSDSSAPKAYGYVYTADPETLDYLISSKNSTTVVTSNGIDGLFTNDNYGNLAPAVAEDWEVSKDGLTYTYKIRKGVKWFTSDGEEYAEVTAKDFVNGLKHAADKKSEAMYLAENSVKGLADYLSGTSTDFSTVGVKAVDDYTLQYTLNQPEPFWNSKLTYSIFWPLNEEFETSKGSDFAKPTDPTSLLYNGPFLLKGLTAKSSVEFVKNEQYWDKENVHLDTINLAYYDGSDQESLERNFTSGAYSYARLYPTSSNYSKVAEEYKDNIYYTQSGSGIAGLGVNIDRQSYNYTSKTTDSEKVATKKALLNKDFRQALNFALDRSAYSAQINGKDGAALAVRNLFVKPDFVSAGEKTFGDLVAAQLPAYGDEWKGVNLADGQDGLFNADKAKAEFAKAKKALEADGVQFPIHLDVPVDQASKNYISRIQSFKQSVETVLGVENVVVDIQQMTSDEFLNITYYAANASSEDWDVSGGVSWGPDYQDPSTYLDILKTTSSETTKTYLGFDNPNSPSVVQVGLKEYDKLVDEAARETSDLNVRYEKYAAAQAWLTDSSLFIPAMASSGAAPVLSRIVPFTGASAQTGSKGSDVYFKYLKSQDKVVTKEEYEKAREKWLKEKAESNEKAQKELASHVK

SEQ ID NO: 171 - protein, 262 aa, Streptococcus pneumoniae
  MISC_FEATURE: AnrP770375
MPITSLEIKDKTFGTRFRGFDPEEVDEFLDIVVRDYEDLVRANHDKNLRIKSLEERLSYFDEIKDSLSQSVLIAQDTAERVKQAAHERSNNIIHQAEQDAQRLLEEAKYKANEILRQATDNAKKVAVETEELKNKSRVFHQRLKSTIESQLAIVESSDWEDILRPTATYLQTSDEAFKEVVSEVLGEPIPAPIEEEPIDMTRQFSQAEMAELQARIEVADKELSEFEAQIKQEVEAPTPVVSPQVEEEPLLIQLAQCMKNQK

SEQ ID NO: 172 - protein, 386 aa, Streptococcus pneumoniae
  MISC_FEATURE: AnrP900265
MKKKFALSFVALASVALLAACGEVKSGAVNTAGNSVEEKTIKIGFNFEESGSLAAYGTAEQKGAQLAVDEINAAGGIDGKQIEVVDKDNKSETAEAASVTTNLVTQSKVSAVVGPATSGATAAAVANATKAGVPLISPSATQDGLTKGQDYLFIGTFQDSFQGKIISNYVSEKLNAKKVVLYTDNASDYAKGIAKSFRESYKGEIVADETFVAGDTDFQAALTKMKGKDFDAIVVPGYYNEAGKIVNQARGMGIDKPIVGGDGFNGEEFVQQATAEKASNIYFISGFSTTVEVSAKAKAFLDAYRAKYNEEPSTFAALAYDSVHLVANAAKGAKNSGEIKNNLAKTKDFEGVTGQTSFDADHNTVKTAYMMTMNNGKVEAAEVVKP

SEQ ID NO: 173 - protein, 305 aa, Streptococcus pneumoniae
  MISC_FEATURE: AnrP906899
MSDLKKYEGVIPAFYACYDDQGEVSPERTRALVQYFIDKGVQGLYVNGSSGECIYQSVEDRKLILEEVMAVAKGKLTIIAHVACNNTKDSMELARHAESLGVDAIATIPPIYFRLPEYSVAKYWNDISSAAPNTDYVIYNIPQLAGVALTPSLYTEMLKNPRVIGVKNSSMPVQDIQTFVSLGGEDHIVFNGPDEQFLGGRLMGARAGIGGTYGAMPELFLKLNQLIADKDLETARELQYAINAIIGKLTSAHGNMYGVIKEVLKINEGLNIGSVRSPLTPVTEEDRPVVEAAAALIRETKERFL

SEQ ID NO: 174 - protein, 740 aa, Streptococcus pneumoniae
  MISC_FEATURE: AnrP913599
MKKNIKQYVTLGTVVVLSAFVANSVAAQETETSEVSTPKLVQPVAPTTPISEVQPTSDNSSEVTVQPRTVETTVKDPSSTAEETPVLEKNNVTLTGGGENVTKELKDKFTSGDFTVVIKYNQSSEKGLQALFGISNSKPGQQNSYVDVFLRDNGELGMEARDTSSNKNNLVSRPASVWGKYKQEAVTNTVAVVADSVKKTYSLYANGTKVVEKKVDNFLNIKDIKGIDYYMLGGVKRAGKTAFGFNGTLENIKFFNSALDEETVKKMTTNAVTGHLIYTANDTTGSNYFRIPVLYTFSNGRVFSSIDARYGGTHDFLNKINIATSYSDDNGKTWTKPKLTLAFDDFAPVPLEWPREVGGRDLQISGGATYIDSVIVEKKNKQVLMFADVMPAGVSFREATRKDSGYKQIDGNYYLKLRKQGDTDYNYTIRENGTVYDDRTNRPTEFSVDKNFGIKQNGNYLTVEQYSVSFENNKKTEYRNGTKVHMNIFYKDALFKVVPTNYIAYISSNDHGESWSAPTLLPPIMGLNRNAPYLGPGRGIIESSTGRILIPSYTGKESAFIYSDDNGASWKVKVVPLPSSWSAEAQFVELSPGVIQAYMRTNNGKIAYLTSKDAGTTWSAPEYLKFVSNPSYGTQLSIINYSQLIDGKKAVILSTPNSTNGRKHGQIWIGLINDDNTIDWRYHHDVDYSNYGYSYSTLTELPNHEIGLMFEKFDSWSRNELHMKNVVPYITFKIEDLKKN

SEQ ID NO: 175 - protein, 4 aa, Streptococcus pneumoniae
  MISC_FEATURE: AnrP973305
ANRP

SEQ ID NO: 176 - protein, 195 aa, Streptococcus pneumoniae
  MISC_FEATURE: AnrP570195
MKSITKKIKATLAGVAALFAVFAPSFVSAQESSTYTVKEGDTLSEIAETHNTTVEKLAENNHIDNIHLIYVDQELVIDGPVAPVATPAPATYAAPAAQDETVSAPVAETPVVSETVVSTVSGSEAEAKEWIAQKESGGSYTATNGRYIGRYQLTDSYLNGDYSAENQERVADAYVAGRYGSWTAAKNFWLNNGWY

SEQ ID NO: 177 - protein, 276 aa, Streptococcus pneumoniae
  MISC_FEATURE: AnrP506333
MKKIVKYSSLAALALVAAGVLAACSGGAKKEGEAASKKEIIVATNGSPKPFIYEENGELTGYEIEVVRAIFKDSDKYDVKFEKTEWSGVFAGLDADRYNMAVNNLSYTKERAEKYLYAAPIAQNPNVLVVKKDDSSIKSLDDIGGKSTEVVQATTSAKQLEAYNAEHTDNPTILNYTKADLQQIMVRLSDGQFDYKIFDKIGVETVIKNQGLDNLKVIELPSDQQPYVYPLLAQGQDELKSFVDKRIKELYKDGTLEKLSKQFFGDTYLPAEADIK

SEQ ID NO: 178 - protein, 212 aa, Streptococcus pneumoniae
  MISC_FEATURE: AnrP4742
MNLLIMGLPGAGKGTQAAKIVEQFHVAHISTGDMFRAAMANQTEMGVLAKSYIDKGELVPDEVTNGIVKERLSQDDIKETGFLLDGYPRTIEQAHALDKTLAELGIELEGVINIEVNPDSLLERLSGRIIHRVTGETFHKVFNPPVDYKEEDYYQREDDKPETVKRRLDVNIAQGEPIIAHYRAKGLVHDIEGNQDINDVFSDIEKVLTNLK

SEQ ID NO: 179 - protein, 102 aa, Streptococcus pneumoniae
  MISC_FEATURE: AnrP867168
MVKIGLFCAAGFSTGMLVNNMKIAAQSSGVEAEIEAFSQSKLADYAPNIDVALLGPQVAYTLDKSKEICDKCDVPIAVIPMMDYGMLDGKKVLDLALSLISG

SEQ ID NO: 180 - protein, 362 aa, Streptococcus pneumoniae
  MISC_FEATURE: AnrP150728
MRIFASPSRYIQGENALFENAKSILDLGNYPILLCDQLVYDIVGKRFEDYLHRYGFHIVLALFNGEASDNEINRVVALAEKENCDSIIGLGGGKTIDSAKAIADLIEKPVIIAPTIASTDAPVSALSVIYTDEGAFDHYLFYSKNPDLVLVDTKVISQAPKRLLASGIADGLATWVEARAVMQANGKTMLGQQQTLAGVAIAKKCEETLFADGLQAMAACEAKVVTPALENIVEANTLLSGLGFESGGLAAAHAIHNGFTALTGDIHHLTHGEKVAYGTLVQLLLENRPKEELDKYIEFYKKIGMPTTLKEMHLDQVGYDDLIKVGKQATMEGETIHQMPFKISPSDVAQAIIAVDAYVNSK

SEQ ID NO: 181 - protein, 1256 aa, Streptococcus pneumoniae
  MISC_FEATURE: AnrP264781
MRKTPSHTEKKMVYSIRSLKNGTGSVLIGASLVLLAMATPTISSDESTPTTNEPNNRNTTTLAQPLTDTAADSGKNESDISSPRNANASLEKTEEKPATEPTTSTSPVTTETKAEEPIEDNYFRIHVKKLPEENKDAQGLWTWDDVEKPSENWPNGALSFKDAKKDDYGYYLDVKLKGEQAKKISFLINNTAGKNLTGDKSVEKLVPKMNEAWLDQDYKVFSYEPQPAGTVRVNYYRTDGNYDKKSLWYWGDVKNPSSAQWPDGTDFTATGKYGRYIDIPLNEAAREFGFLLLDESKQGDDVKIRKENYKFTDLKNHSQIFLKDDDESIYTNPYYVHDIRMTGAQHVGTSSIESSFSTLVGAKKEDILKHSNITNHLGNKVTITDVAIDEAGKKVTYSGDFSDTKHPYTVSYNSDQFTTKTSWHLKDETYSYDGKLGADLKEEGKQVDLTLWSPSADKVSVVVYDKNDPDKVVGTVALEKGERGTWKQTLDSTNKLGITDFTGYYYQYQIERQGKTVLALDPYAKSLAAWNSDDAKIDDAHKVAKAAFVDPAKLGPQDLTYGKIHNFKTREDAVIYEAHVRDFTSDPAIAKDLTKPFGTFEAFIEKLDYLKDLGVTHIQLLPVLSYYFVNELKNHERLSDYASSNSNYNWGYDPQNYFSLTGMYSSDPKNPEKRIAEFKNLINEIHKRGMGAILDVVYNHTAKVDIFEDLEPNYYHFMDADGTPRTSFGGGRLGTTHHMTKRLLVDSIKYLVDTYKVDGFRFDMMGDHDAASIEEAYKAARALNPNLIMLGEGWRTYAGDENMPTKAADQDWMKHTDTVAVFSDDIRNNLKSGYPNEGQPAFITGGKRDVNTIFKNLIAQPTNFEADSPGDVIQYIAAHDNLTLFDIIAQSIKKDPSKAENYAEIHRRLRLGNLMVLTAQGTPFIHSGQEYGRTKQFRDPAYKTPVAEDKVPNKSHLLRDKDGNPFDYPYFIHDSYDSSDAVNKFDWTKATDGKAYPENVKSRDYMKGLIALRQSTDAFRLKSLQDIKDRVHLITVPGQNGVEKEDVVIGYQITAPNGDIYAVFVNADEKAREFNLGTAFAHLRNAEVLADENQAGSVGIANPKGLEWTEKGLKLNALTATVLRVSQNGTSHESTAEEKPDSTPSKPEHQDPAPEARPDSTKPDAKVADAENKPSQATADSQAEQPAQEAQASSVKEAVQNESVENSSKKNIPATPDRQAELPNTGIKNENKLLFAGISLLALLGLGFLLKNKKEN

SEQ ID NO: 182 - protein, 1078 aa, Streptococcus pneumoniae
  MISC_FEATURE: AnrP641284
MILQYVYWSVYMQTKTKKLIVSLSSLVLSGFLLNHYMTVGAEETTTNTIQQSQKEVQYQQRDTKNLVENGDFGQTEDGSSPWTGSKAQGWSAWVDQKNSSADASTRVIEAKDGAITISSPEKLRAAVHRMVPIEAKKKYKLRFKIKTDNKVGIAKVRIIEESGKDKRLWNSATTSGTKDWQTIEADYSPTLDVDKIKLELFYETGTGTVSFKDIELVEVADQPSEDSQTDKQLEEKIDLPIGKKHVFSLADYTYKVENPDVASVKNGILEPLKEGTTNVIVSKDGKEVKKIPLKILASVKDTYTDRLDDWNGIIAGNQYYDSKNEQMAKLNQELEGKVADSLSSISSQADRIYLWEKFSNYKTSANLTATYRKLEEMAKQVTNPSSRYYQDETVVRTVRDSMEWMHKHVYNSEKSIVGNWWDYEIGTPRAINNTLSLMKEYFSDEEIKKYTDVIEKFVPDPEHFRKTTDNPFKALGGNLVDMGRVKVIAGLLRKDDQEISSTIRSIEQVFKLVDQGEGFYQDGSYIDHTNVAYTGAYGNVLIDGLSQLLPVIQKTKNPIDKDKMQTMYHWIDKSFAPLLVNGELMDMSRGRSISRANSEGHVAAVEVLRGIHRIADMSEGETKQRLQSLVKTIVQSDSYYDVFKNLKTYKDISLMQSLLSDAGVASVPRTSYLSAFNKMDKTAMYNAEKGFGFGLSLFSSRTLNYEHMNKENKRGWYTSDGMFYLYNGDLSHYSDGYWPTVNPYKMPGTTETDAKRADSDTGKVLPSAFVGTSKLDDANATATMDFTNWNQTLTAHKSWFMLKDKIAFLGSNIQNTSTDTAATTIDQRKLESSNPYKVYVNDKEASLTEQEKDYPETQSVFLESSDSKKNIGYFFFKKSSISMSKALQKGAWKDINEGQSDKEVENEFLTISQAHKQNGDSYGYMLIPNVDRATFNQMIKELESSLIENNETLQSVYDAKQGVWGIVKYDDSVSTISNQFQVLKRGVYTIRKEGDEYKIAYYNPETQESAPDQEVFKKLEQAAQPQVQNSKEKEKSEEEKNHSDQKNLPQTGEGQSILASLGFLLLGAFYLFRRGKNN

SEQ ID NO: 183 - protein, 271 aa, Streptococcus pneumoniae
  MISC_FEATURE: AnrP136162
MTNTSFSIEQFSLKGKIALITGASYGIGFAIAKSYAEAGATIVFNDINQDLVNKGIEAYREVGIEAHGYVCDVTDEDGIQAMVKQIEQEVGVIDILVNNAGIIRRVPMCEMSAADFRKVIDIDLNAPFIVSKAVIPSMIKKGHGKIINICSMMSELGRETVSAYAAAKGGLKMLTRNIASEYGGANIQCNGIGPGYIATPQTAPLRELQEDGSRHPFDQFIIAKTPAARWGNPEDLMGPAVFLASDASNFVNGHILYVDGGILAYIGKQPE

SEQ ID NO: 184 - protein, 701 aa, Streptococcus pneumoniae
  MISC_FEATURE: AnrP97557
MNNNFNNFNNMDDLFNQLMGGMRGYSSENRRYLINGREVTPEEFAHYRATGQLPGNAETDVQMPQQASGMKQGGVLAKLGRNLTAEAREGKLDPVIGRNKEIQETSEILSRRTKNNPVLVGDAGVGKTAVVEGLAQAIVNGDVPAAIKNKEIISIDISGLEAGTQYRGSFEENVQNLVNEVKEAGNIILFFDEIHQILGAGSTGGDSGSKGLADILKPALSRGELTVIGATTQDEYRNTILKNAALARRFNEVKVNAPSAENTFKILQGIRDLYQQHHNVILPDEVLKAAVDYSVQYIPQRSLPDKAIDLVDVTAAHLAAQHPVTDVHAVEREIETEKDKQEKAVEAEDFEAALNYKTRIAELERKIENHTEDMKVTASVNDVAESVERMTGIPVSQMEASDIERLKDMAHRLQDKVIGQDKAVEVVARAIRRNRAGFDEGNRPIGNFLFVGSTGVGKTELAKQLALDMFGTQDAIIRLDMSEYSDRTAVSKLIGTTAGYVGYDDNSNTLTERVRRNPYSIILLDEIEKADPQVITLLLQVLDDGRLTDGQGNTVNFKNTVIIATSNAGFGYEANLTEDADKPELMDRLKPFFRPEFLNRFNAVIEFSHLTKEDLSKIVDLMLAEVNQTLAKKDIDLVVSQAAKDYITEEGYDEVMGVRPLRRVVEQEIRDKVTDFHLDHLDAKHLEADMEDGVLVIREKV

SEQ ID NO: 185 - protein, 1767 aa, Streptococcus pneumoniae
  MISC_FEATURE: AnrP261700
MNKGLFEKRCKYSIRKFSLGVASVMIGATFFGTSPVLADSVQSGSTANLPADLATALATAKENDGHDFEAPKVGEDQGSPEVTDGPKTEEELLALEKEKPAEEKPKEDKPAAAKPETPKTVTPEWQTVEKKEQQGTVTIREEKGVRYNQLSSTAQNDNAGKPALFEKKGLTVDANGNATVDLTFKDDSEKGKSRFGVFLKFKDTKNNVFVGYDKDGWFWEYKSPTTSTWYRGSRVAAPETGSTNRLSITLKSDGQLNASNNDVNLFDTVTLPAAVNDHLKNEKKILLKAGSYDDERTVVSVKTDNQEGVKTEDTPAEKETGPEVDDSKVTYDTIQSKVLKAVIDQAFPRVKEYSLNGHTLPGQVQQFNQVFINNHRITPEVTYKKINETTAEYLMKLRDDAHLINAEMTVRLQVVDNQLHFDVTKIVNHNQVTPGQKIDDERKLLSSISFLGNALVSVSSDQTGAKFDGATMSNNTHVSGDDHIDVTNPMKDLAKGYMYGFVSTDKLAAGVWSNSQNSYGGGSNDWTRLTAYKETVGNANYVGIHSSEWQWEKAYKGIVFPEYTKELPSAKVVITEDANADKKVDWQDGAIAYRSIMNNPQGWKKVKDITAYRIAMNFGSQAQNPFLMTLDGIKKINLHTDGLGQGVLLKGYGSEGHDSGHLNYADIGKRIGGVEDFKTLIEKAKKYGAHLGIHVNASETYPESKYFNEKILRKNPDGSYSYGWNWLDQGINIDAAYDLAHGRLARWEDLKKKLGDGLDFIYVDVWGNGQSGDNGAWATHVLAKEINKQGWRFAIEWGHGGEYDSTFHHWAADLTYGGYTNKGINSAITRFIRNHQKDAWVGDYRSYGGAANYPLLGGYSMKDFEGWQGRSDYNGYVTNLFAHDVMTKYFQHFTVSKWENGTPVTMTDNGSTYKWTPEMRVELVDADNNKVVVTRKSNDVNSPQYRERTVTLNGRVIQDGSAYLTPWNWDANGKKLSTDKEKMYYFNTQAGATTWTLPSDWAKSKVYLYKLTDQGKTEEQELTVKDGKITLDLLANQPYVLYRSKQTNPEMSWSEGMHIYDQGFNSGTLKHWTISGDASKAEIVKSQGANDMLRIQGNKEKVSLTQKLTGLKPNTKYAVYVGVDNRSNAKASITVNTGEKEVTTYTNKSLALNYVKAYAHNTRRNNATVDDTSYFQNMYAFFTTGSDVSNVTLTLSREAGDEATYFDEIRTFENNSSMYGDKHDTGKGTFKQDFENVAQGIFPFVVGGVEGVEDNRTHLSEKHDPYTQRGWNGKKVDDVIEGNWSLKTNGLVSRRNLVYQTIPQNFRFEAGKTYRVTFEYEAGSDNTYAFVVGKGEFQSGRRGTQASNLEMHELPNTWTDSKKAKKATFLVTGAETGDTWVGIYSTGNASNTRGDSGGNANFRGYNDFMMDNLQIEEITLTGKMLTENALKNYLPTVAMTNYTKESMDALKEAVFNLSQADDDISVEEARAEIAKIEALKNALVQKKTALVADDFASLTAPAQAQEGLANAFDGNLSSLWHTSWGGGDVGKPATMVLKEATEITGLRYVPRGSGSNGNLRDVKLVVTDESGKEHTFTATDWPDNNKPKDIDFGKTIKAKKIVLTGTKTYGDGGDKYQSAAELIFTRPQVAETPLDLSGYEAALAKAQKLTDKDNQEEVASVQASMKYATDNHLLTERMVEYFADYLNQLKDSATKPDAPTVEKPEFKLSSVASDQGKTPDYKQEIARPETPEQILPATGESQFDTALFLASVSLALSALFVVKTKKD

SEQ ID NO: 186 - protein, 243 aa, Streptococcus pneumoniae
  MISC_FEATURE: AnrP175901
MKLEHKNIFITGSSRGIGLAIAHKFAQAGANIVLNSRGAISEELLAEFSNYGIKVVPISGDVSDFADAKRMIDQAIAELGSVDVLVNNAGITQDTLMLKMTEADFEKVLKVNLTGAFNMTQSVLKPMMKAREGAIINMSSVVGLMGNIGQANYAASKAGLIGFTKSVAREVASRNIRVNVIAPGMIESDMTAILSDKIKEATLAQIPMKEFGQAEQVADLTVFLAGQDYLTGQVVAIDGGLSM

SEQ ID NO: 187 - protein, 488 aa, Streptococcus pneumoniae
  MISC_FEATURE: AnrP58038
MTFNNKTIEELHNLLVSKEISATELTQATLENIKSREEALNSFVTIAEEQALVQAKAIDEAGIDADNVLSGIPLAVKDNISTDGILTTAASKMLYNYEPIFDATAVANAKTKGMIVVGKTNMDEFAMGGSGETSHYGATKNAWDHSKVPGGSSSGSAAAVASGQVRLSLGSDTGGSIRQPAAFNGIVGLKPTYGTVSRFGLIAFGSSLDQIGPFAPTVKENALLLNAIASEDAKDSTSAPVRIADFTSKIGQDIKGMKIALPKEYLGEGIDPEVKETILNAAKHFEKLGAIVEEVSLPHSKYGVAVYYIIASSEASSNLQRFDGIRYGYRAEDATNLDEIYVNSRSQGFGEEVKRRIMLGTFSLSSGYYDAYYKKAGQVRTLIIQDFEKVFADYDLILGPTAPSVAYDLDSLNHDPVAMYLADLLTIPVNLAGLPGISIPAGFSQGLPVGLQLIGPKHSEETIYQVAAAFEATTGYHKQQPVIFGGDN

SEQ ID NO: 188 - protein, 345 aa, Streptococcus pneumoniae
  MISC_FEATURE: AnrP561535
MNQTVEYIKELTAIASPTGFTREIADYLVKTLEGFGYQPVRTSKGGVNVTIKGQNDEQHRYVTAHVDTLGAIVRAVKPDGRLKMDRIGGFPWNMIEGENCTIHVASTGEKVSGTILIHQTSCHVYKDAGTAERTQDNMEVRLDAKVTSEKETRALGIEVGDFISFDPRTVVTETGFIKSRHLDDKVSAAILLNLLRIYKEEKIELPVTTHFAFSVFEEVGHGANSNIPAQVVEYLAVDMGAMGDDQQTDEYTVSICVKDASGPYHYDFRQHLVALAKEQDIPFKLDIYPFYGSDASAAMSAGAEVKHALLGAGIESSHSYERTHIDSVIATERMVDAYLKSTLVD

SEQ ID NO: 189 - protein, 256 aa, Streptococcus pneumoniae
  MISC_FEATURE: AnrP876509
MSVLEIKDLHVEIEGKEILKGVNLTLKTGEIAAIMGPNGTGKSTLSAAIMGNPNYEVTKGEVLFDGVNILELEVDERARMGLFLAMQYPSEIPGITNAEFLRAAMNAGKEDDEKISVREFITKLDEKMELLNMKEEMAERYLNEGFSGGEKKRNEILQLLMLEPTFALLDEIDSGLDIDALKVVSKGVNAMRGEGFGAMIITHYQRLLNYITPDVVHVMMEGRVVLSGGPELAARLEREGYAKLAEELGYDYKEEL

SEQ ID NO: 190 - protein, 335 aa, Streptococcus pneumoniae
  MISC_FEATURE: AnrP394514
MKRIAVLTSGGDAPGMNAAIRAVVRQAISEGMEVFGIYDGYAGMVAGEIHPLDAASVGDIISRGGTFLHSARYPEFAQLEGQLKGIEQLKKHGIEGVVVIGGDGSYHGAMRLTEHGFPAIGLPGTIDNDIVGTDFTIGFDTAVTTAMDAIDKIRDTSSSHRRTFVIEVMGRNAGDIALWAGIATGADEIIIPEAGFKMEDIVASIKAGYECGKKHNIIVLAEGVMSAAEFGQKLKEAGDTSDLRVTELGHIQRGGSPTARDRVLASRMGAHAVKLLKEGIGGVAVGIRNEKMVENPILGTAEEGALFSLTAEGKIVVNNPHKADIELSSLNKSLS

SEQ ID NO: 191 - protein, 324 aa, Streptococcus pneumoniae
  MISC_FEATURE: AnrP598862
MRKKLFLTSAAILWAVTAMNSVHAATDVQKVIDETYVQPEYVLGSSLSEDQKNQTLKKLGYNASTDTKELKTMTPDVYSKIMNVANDSSLQLYSSAKIQKLGDKSPLEVKIETPENITKVTQDMYRNAAVTLGMEHAKITVAAPIPVTGESALAGIYYSLEANGAKVPQANKDLAQEELKALSDINAENKDKSGYDANKLNVALADIKSGLAKAKESKGNLTEEDIRKIVEDTLKNYKLDQVITGNQINIIINFALNLSKSDILSNADFTKTLNDLKQSIVSQAGDSFKNINLNFDADKALEDGGNFLSSLWQALVNFFKSFGS

SEQ ID NO: 192 - protein, 759 aa, Streptococcus pneumoniae
  MISC_FEATURE: AnrP167912
MYNYPMRIHYHRKNGEYDTCSFVKSQDQRIDLLTYKEDYFGALFSFEHPSSHVIESLNFVVHTGQTSKEYSIRFNHYPLLTEVWILEGDDRIYYSENPAIASPFYKNQNPFAFDKAINSASFDHHWGYQGELGCRVEDNQAHFSLWSPTATEVQVVVYESAANDAPVWKTFEMKRGNSYSYNHKDNTIGVWSLDVEEDLVGKTYQYQVQFPHHQTLTRDPYTIATSPDGKRSAILSHVEKQVENFEVKHGSEATWRLENPCKAVICEMHIRDLTKSPTSGVDEHLRGTFLGAAQAGTVNQYGQSTAFDYIKKLGYNYVQLQPIADRHKEYDEDGNVTYNWGYDPQNYNAPETSFSTNPDDPAQVIRDLKVMVQAYHDAGIGVIMDVVYNHTFSVVDAPFQTTVPDYYYRMNPDGTFQNGTGVGNETASEHEMFRKYMIDSLLYWVQEYNIDGFRFDLMGIHDVKTMQMIRQSLDEIDSNIILYGEGWDMGTGLAPYDKAKKDNAYQMPNIGFFNDNQRDAVKGGEVYGAIKSGFVSGAATEPILAKAILGSRELGSYTHPNQVLNYVEAHDNYNLHDLLATLHPDQSSEQIMRKVETATAMNLLMQGMAFMEIGQEFGRTKLVATGENGELTHDDRERAMNSYNAPDSVNQVNWNLINERQDSIEFIRQVIRLKTKTGAFSYSSYDEIYHHVFVHSAIEHSGCLIYEVHGKEHLLVVVNAKSEPYQFENAGNLAMLVTNSRSKEDNVLNDISLAVLSVL

SEQ ID NO: 193 - protein, 325 aa, Streptococcus pneumoniae
  MISC_FEATURE: AnrP41710
MTSTKQHKKVILVGDGAVGSSYAFALVNQGIAQELGIIEIPQLHEKAVGDALDLSHALAFTSPKKIYAAQYSDCADADLVVITAGAPQKPGETRLDLVGKNLAINKSIVTQVVESGFKGIFLVAANPVDVLTYSTWKFSGFPKERVIGSGTSLDSARFRQALAEKLDVDARSVHAYIMGEHGDSEFAVWSHANIAGVNLEEFLKDTQNVQEAELIELFEGVRDAAYTIINKKGATYYGIAVALARITKAILDDENAVLPLSVFQEGQYGVENVFIGQPAVVGAHGIVRPVNIPLNDAETQKMQASAKELQAIIDEAWKNPEFQEA

SEQ ID NO: 194 - protein, 292 aa, Streptococcus pneumoniae [sequence omitted]

SEQ ID NO: 195 - protein, 303 aa, Streptococcus pneumoniae
  MISC_FEATURE: AnrP609662
MYDTIIIGAGPAGMTAALYAARSNLKVALIEGGLPGGQMNNTSDIENYPGYANISGPELAEKMFEPLENLGVEHIYGYVENVEDHGDFKKVMTDDQTYETRTVIVATGSKHRPLGVPGEEELNSRGVSYCAVCDGAFFRDQDLLVVGGGDSAVEEALFLTRFAKTVTIVHRRDQLRAQKVLQDRAFANEKISFIWDSVVREIKGENRVESVVFENVKTGQVTEQAFGGVFIYVGLDPLSDFVKELNIQDQAGWIVTDNHMKTAVDGIFAVGDVRLKDLRQVTTAVGDGAIAGQEAYKFITEHS

SEQ ID NO: 196 - protein, 459 aa, Streptococcus pneumoniae
  MISC_FEATURE: AnrP757262
MSKIVVVGANHAGTACINTMLDNFGNENEIVVFDQNSNISFLGCGMALWIGEQIDGAEGLFYSDKEKLEAKGAKVYMNSPVLSIDYDNKVVTAEVEGKEHKESYEKLIFATGSTPILPPIEGVEIVKGNREFKATLENVQFVKLYQNAEEVINKLSDKSQHLDRIAVVGGGYIGVELAEAFERLGKEVVLVDIVDTVLNGYYDKDFTQMMAKNLEDHNIRLALGQTVKAIEGDGKVERLITDKESFDVDMVILAVGFRPNTALADGKIELFRNGAFLVDKKQETSIPGVYAVGDCATVYDNARKDTSYIALASNAVRTGIVGAYNACGHELEGIGVQGSNGISIYGLHMVSTGLTLEKAKAAGYNATETGFNDLQKPEFMKHDNHEVAIKIVFDKDSREILGAQMVSHDIAISMGIHMFSLAIQEHVTIDKLALTDLFFLPHFNKPYNYITMAALTAEK

SEQ ID NO: 197 - protein, 630 aa, Streptococcus pneumoniae
  MISC_FEATURE: AnrP437818
MTRYQDDFYDAINGEWQQTAEIPADKSQTGGFVDLDQEIEDLMLATTDKWLAGEEVPEDAILENFVKYHRLVRDFDKREADGITPVLPLLKEFQELETFADFTAKLAEFELAGKPNFLPFGVSPDFMDARINVLWASAPSTILPDTTYYAEEHPQREELLTLWKESSANLLKAYDFSDEEIEDLLEKRLELDRRVAAVVLSNEESSEYAKLYHPYSYEDFKKFAPALPLDDFFKAVIGQLPDKVIVDEERFWQAAEQFYSEESWSLLKATLILSVVNLSTSYLTEDIRVLSGAYSRALSGVPEAKDKVKAAYHLAQEPFKQALGLWYAREKFSPEAKADVEKKVATMIDVYKERLLKNDWLTPETCKQAIVKLNVIKPYIGYPEELPARYKDKVVNETASLFENALAFARVEIKHSWSKWNQPVDYKEWGMPAHMVNAYYNPQKNLIVFPAAILQAPFYDLHQSSSANYGGIGAVIAHEISHAFDTNGASFDENGSLKDWWTESDYAAFKEKTQKVIDQFDGQDSYGATINGKLTVSENVADLGGIAAALEAAKREADFSAEEFFYNFGRIWRMKGRPEFMKLLASVDVHAPAKLRVNVQVPNFDDFFTTYDVKEGDGMWRSPEERVIIW

SEQ ID NO: 198 - protein, 230 aa, Streptococcus pneumoniae
  MISC_FEATURE: AnrP166452
MVKLVFARHGESEWNKANLFTGWADVDLSEKGTQQAIDAGKLIKEAGIEFDQAYTSVLKRAIKTTNLALEASDQLWVPVEKSWRLNERHYGGLTGKNKAEAAEQFGDEQVHIWRRSYDVLPPNMDRDDEHSAHTDRRYASLDDSVIPDAENLKVTLERALPFWEDKIAPALKDGKNVFVGAHGNSIRALVKHIKGLSDDEIMDVEIPNFPPLVFEFDEKLNVVSEYYLGK

SEQ ID NO: 199 - protein, 457 aa, Streptococcus pneumoniae
  MISC_FEATURE: AnrP270182
MAREGFFTGLDIGTSSVKVLVAEQRNGELNVIGVSNAKSKGVKDGIIVDIDAAATAIKSAISQAEEKAGISIKSVNVGLPGNLLQVEPTQGMIPVTSDTKEITDQDVENVVKSALTKSMTPDREVITFIPEEFIVDGFQGIRDPRGMMGVRLEMRGLLYTGPRTILHNLRKTVERAGVQVENVIISPLAMVQSVLNEGEREFGATVIDMGAGQTTVATIRNQELQFTHILQEGGDYVTKDISKVLKTSRKLAEGLKLNYGEAYPPLASKETFQVEVIGEVEAVEVTEAYLSEIISARIKHILEQIKQELDRRRLLDLPGGIVLIGGNAILPGMVELAQEVFGVRVKLYVPNQVGIRNPAFAHVISLSEFAGQLTEVNLLAQGAIKGENDLSHQPISFGGMLQKTAQFVQSTPVQPAPAPEVEPVAPTEPMADFQQASQNKPKLADRFRGLIGSMFDE

SEQ ID NO: 200 - protein, 1035 aa, Streptococcus pneumoniae
  MISC_FEATURE: AnrP348202
MSYFRNRDIDIERNSMNRSVQERKCRYSIRKLSVGAVSMIVGAVVFGTSPVLAQEGASEQPLANETQLSGESSTLTDTEKSQPSSETELSGNKQEQERKDKQEEKIPRDYYARDLENVETVIEKEDVETNASNGQRVDLSSELDKLKKLENATVHMEFKPDAKAPAFYNLFSVSSATKKDEYFTMAVYNNTATLEGRGSDGKQFYNNYNDAPLKVKPGQWNSVTFTVEKPTAELPKGRVRLYVNGVLSRTSLRSGNFIKDMPDVTHVQIGATKRANNTVWGSNLQIRNLTVYNRALTPEEVQKRSQLFKRSDLEKKLPEGAALTEKTDIFESGRNGKPNKDGIKSYRIPALLKTDKGTLIAGADERRLHSSDWGDIGMVIRRSEDNGKTWGDRVTITNLRDNPKASDPSIGSPVNIDMVLVQDPETKRIFSIYDMFPEGKGIFGMSSQKEEAYKKIDGKTYQILYREGEKGAYTIRENGTVYTPDGKATDYRVVVDPVKPAYSDKGDLYKGNQLLGNIYFTTNKTSPFRIAKDSYLWMSYSDDDGKTWSAPQDITPMVKADWMKFLGVGPGTGIVLRNGPHKGRILIPVYTTNNVSHLNGSQSSRIIYSDDHGKTWHAGEAVNDNRQVDGQKIHSSTMNNRRAQNTESTVVQLNNGDVKLFMRGLTGDLQVATSKDGGVTWEKDIKRYPQVKDVYVQMSAIHTMHEGKEYIILSNAGGPKRENGMVHLARVEENGELTWLKHNPIQKGEFAYNSLQELGNGEYGILYEHTEKGQNAYTLSFRKFNWDFLSKDLISPTEAKVKRTREMGKGVIGLEFDSEVLVNKAPTLQLANGKTARFMTQYDTKTLLFTVDSEDMGQKVTGLAEGAIESMHNLPVSVAGTKLSNGMNGSEAAVHEVPEYTGPLGTSGEEPAPTVEKPEYTGPLGTSGEEPAPTVEKPEYTGPLGTAGEEAAPTVEKPEFTGGVNGTEPAVHEIAEYKGSDSLVTLTTKEDYTYKAPLAQQALPETGNKESDLLASLGLTAFFLGLFTLGKKREQ

SEQ ID NO: 201 - protein, 253 aa, Streptococcus pneumoniae
  MISC_FEATURE: AnrP260849
MAKNVVITGATSGIGEAIARAYLEQGEDVVLTGRRIDRLEILKSEFAVSFPNQTVWTFPLDVTDMVMVKTVCSDILETIGRIDILVNNAGLALDLAPYQDYEELDMLTMLDTNVKGLMAVTHCFLPAMIKVNQGHIINMGSTAGIYAYAGAAVYSATKAAVKTFSDGLRIDTIATDIKVTTIQPGIVETDFSTVRFHGDKERAASVYQGIEALQAQDIADTVVYVTSQPRRVQITDMTIMANQQATGFMIHKK

SEQ ID NO: 202 - protein, 336 aa, Streptococcus pneumoniae
  MISC_FEATURE: AnrP68825
MNADDTVTIYDVAREAGVSMATVSRVVNGNKNVKENTRKKVLEVIDRLDYRPNAVARGLASKKTTTVGVVIPNITNGYFSSLAKGIDDIAEMYKYNIVLANSDEDNEKEVSVVNTLFSKQVDGIIYMGYHLTDKIRSEFSRSRTPIVLAGTVDVEHQLPSVNIDYKQATIDAVSYLAKENERIAFVSGPLVDDINGKVRLVGYKETLKKAGITYSEGLVFESKYSYDDGYALAERLISSNATAAVVTGDELAAGVLNGLADKGVSVPEDFEIITSDDSQISRFTRPNLTTIAQPLYDLGAISMRMLTKIMHKEELEEREVLLPHGLTERSSTRKRK

SEQ ID NO: 203 - protein, 401 aa, Streptococcus pneumoniae
  MISC_FEATURE: AnrP570870
MSSKFMKSTAVLGTVTLASLLLVACGSKTADKPADSGSSEVKELTVYVDEGYKSYIEEVAKAYEKEAGVKVTLKTGDALGGLDKLSLDNQSGNVPDVMMAPYDRVGSLGSDGQLSEVKLSDGAKTDDTTKSLVTAANGKVYGAPAVIESLVMYYNKDLVKDAPKTFADLENLAKDSKYAFAGEDGKTTAFLADWTNFYYTYGLLAGNGAYVFGQNGKDAKDIGLANDGSIAGINYAKSWYEKWPKGMQDTEGAGNLIQTQFQEGKTAAIIDGPWKAQAFKDAKVNYGVATIPTLPNGKEYAAFGGGKAWVIPQAVKNLEASQKFVDFLVATEQQKVLYDKTNEIPANTEARSYAEGKNDELTTAVIKQFKNTQPLPNISQMSAEVVADWLIQRIKDKGDQK

SEQ ID NO: 204 - protein, 423 aa, Streptococcus pneumoniae
  MISC_FEATURE: AnrP788451
MSSKFMKSTAVLGTVTLASLLLVACGSKTADKPADSGSSEVKELTVYVDEGYKSYIEEVAKAYEKEAGVKVTLKTGDALGGLDKLSLDNQSGNVPDVMMAPYDRVGSLGSDGQLSEVKLSDGAKTDDTTKSLVTAANGKVYGAPAVIESLVMYYNKDLVKDAPKTFADLENLAKDSKYAFAGEDGKTTAFLADWTNFYYTYGLLAGNGAYVFGQNGKDAKDIGLANDGSIAGINYAKSWYEKWPKGMQDTEGAGNLIQTQFQEGKTAAIIDGPWKAQAFKDAKVNYGVATIPTLPNGKEYAAFGGGKAWVIPQAVKNLEASQKFVDFLVATEQQKVLYDKTNEIPANTEARSYAEGKNDELTTAVIKQFKNTQPLPNISQMSAVWDPAKNMLFDAVSGQKDAKTAANDAVTLIKETIKQKFGE

SEQ ID NO: 205 - protein, 621 aa, Streptococcus pneumoniae
  MISC_FEATURE: AnrP455508
MKKTTILSLTTAAVILAAYVPNEPILADTPSSEVIKETKVGSIIQQNNIKYKVLTVEGNIGTVQVGNGVTPVEFEAGQDGKPFTIPTKITVGDKVFTVTEVASQAFSYYPDETGRIVYYPSSITIPSSIKKIQKKGFHGSKAKTIIFDKGSQLEKIEDRAFDFSELEEIELPASLEYIGTSAFSFSQKLKKLTFSSSSKLELISHEAFANLSNLEKLTLPKSVKTLGSNLFRLTTSLKHVDVEEGNESFASVDGVLFSKDKTQLIYYPSQKNDESYKTPKETKELASYSFNKNSYLKKLELNEGLEKIGTFAFADAIKLEEISLPNSLETIERLAFYGNLELKELILPDNVKNFGKHVMNGLPKLKSLTIGNNINSLPSFFLSGVLDSLKEIHIKNKSTEFSVKKDTFAIPETVKFYVTSEHIKDVLKSNLSTSNDIIVEKVDNIKQETDVAKPKKNSNQGVVGWVKDKGLWYYLNESGSMATGWVKDKGLWYYLNESGSMATGWVKDKGLWYYLNESGSMATGWVKDKGLWYYLNESGSMATGWVKDKGLWYYLNESGSMATGWVKDKGLWYYLNESGSMATGWVTVSGKWYYTYNSGDLLVNTTTPDGYRVNANGEWVG

SEQ ID NO: 206 - protein, 608 aa, Streptococcus pneumoniae
  MISC_FEATURE: AnrP33115
MEFSKKTRELSIKKMQERTLDLLIIGGGITGAGVALQAAASGLETGLIEMQDFAEGTSSRSTKLVHGGLRYLKQFDVEVVSDTVSERAVVQQIAPHIPKPDPMLLPVYDEDGATFSLFRLKVAMDLYDLLAGVSNTPTANKVLSKDQVLERQPNLKKEGLVGGGVYLDFRNNDARLVIENIKRANQDGALIANHVKAEGFLFDESGKITGVVARDLLTDQVFEIKARLVINTTGPWSDKVRNLSNKGTQFSQMRPTKGVHLVVDSSKIKVSQPVYFDTGLGDGRMVFVLPRENKTYFGTTDTDYTGDLEHPKVTQEDVDYLLGIVNNRFPESNITIDDIESSWAGLRPLIAGNSASDYNGGNNGTISDESFDNLIATVESYLSKEKTREDVESAVSKLESSTSEKHLDPSAVSRGSSLDRDDNGLLTLAGGKITDYRKMAEGAMERVVDILKAEFDRSFKLINSKTYPVSGGELNPANVDSEIEAFAQLGVSRGLDSKEAHYLANLYGSNAPKVFALAHSLEQAPGLSLADTLSLHYAMRNELALSPVDFLLRRTNHMLFMRDSLDSIVEPVLDEMGRFYDWTEEEKATYRADVEAALANNDLAELKN

SEQ ID NO: 207 - protein, 461 aa, Streptococcus pneumoniae
  MISC_FEATURE: AnrP474968
MEFSKKTRELSIKKMQERTLDLLIIGGGITGAGVALQAAASGLETGLIEMQDFAEGTSSRSTKLVHGGLRYLKQFDVEVVSDTVSERAVVQQIAPHIPKPDPMLLPVYDEDGATFSLFRLKVAMDLYDLLAGVSNTPTANKVLSKDQVLERQPNLKKEGLVGGGVYLDFRNNDARLVIENIKRANQDGALIANHVKAEGFLFDESGKITGVVARDLLTDQVFEIKARLVINTTGPWSDKVRNLSNKGTQFSQMRPTKGVHLVVDSSKIKVSQPVYFDTGLGDGRMVFVLPRENKTYFGTTDTDYTGDLEHPKVTQEDVDYLLGIVNNRFPESNITIDDIESSWAGLRPLIAGNSASDYNGGNNGTISDESFDNLIATVESYLSKEKTREDVESAVSKLESSTSEKHLDPSAVSRGSSLDRDDNGLLTLAGGKITDYRKMGDEALWSAWLTSSKQNLTVALN

SEQ ID NO: 208 - protein, 608 aa, Streptococcus pneumoniae
  MISC_FEATURE: AnrP956096
MEFSKKTRELSIKKMQERTLDLLIIGGGITGAGVALQAAASGLETGLIEMQDFAEGTSSRSTKLVHGGLRYLKQFDVEVVSDTVSERAVVQQIAPHIPKSDPMLLPVYDEDGATFSLFRLKVAMDLYDLLAGVSNTPAANKVLSKDQVLERQPNLKKEGLVGGGVYLDFRNNDARLVIENIKRANQDGALIANHVKAEGFLFDESGKITGVVARDLLTDQVFEIKARLVINTTGPWSDKVRNLSNKGTQFSQMRPTKGVHLVVDSSKIKVSQPVYFDTGLGDGRMVFVLPRENKTYFGTTDTDYTGDLEHPKVTQEDVDYLLGIVNNRFPESNITIDDIESSWAGLRPLIAGNSASDYNGGNNGTISDESFDNLIATVESYLSKEKTREDVESAVSKLESSTSEKHLDPSAVSRGSSLDRDDNGLLTLAGGKITDYRKMAEGAMERVVDILKAEFDRSFKLINSKTYPVSGGELNPANVDSEIEAFAQLGVSRGLDSKEAHYLANLYGSNAPKVFALAHSLEQAPGLSLADTLSLHYAMRNELTLSPVDFLLRRTNHMLFMRDSLDSIVEPILDEMGRFYDWTEEEKATYRADVEAALANNDLAELKN

SEQ ID NO: 209 - protein, 393 aa, Streptococcus pneumoniae
  MISC_FEATURE: AnrP794279
MKHLKTFYKKWFQLLVVIVISFFSGALGSFSITQLTQKSSVNNSNNNSTITQTAYKNENSTTQAVNKVKDAVVSVITYSANRQNSVFGNDDTDTDSQRISSEGSGVIYKKNDKEAYIVTNNHVINGASKVDIRLSDGTKVPGEIVGADTFSDIAVVKISSEKVTTVAEFGDSSKLTVGETAIAIGSPLGSEYANTVTQGIVSSLNRNVSLKSEDGQAISTKAIQTDTAINPGNSGGPLINIQGQVIGITSSKIATNGGTSVEGLGFAIPANDAINIIEQLEKNGKVTRPALGIQMVNLSNVSTSDIRRLNIPSNVTSGVIVRSVQSNMPANGHLEKYDVITKVDDKEIASSTDLQSALYNHSIGDTIKITYYRNGKEETTSIKLNKSSGDLES

SEQ ID NO: 210 - protein, 1311 aa, Streptococcus pneumoniae
  MISC_FEATURE: AnrP232621
MKHEKQQRFSIRKYAVGAASVLIGFAFQAQTVAADGVTTTTENQPTIHTVSDSPQSSENRTEETPKAELQPEAPKTVETETPATDKVASLPKTEEKPQEEVSSTPSDKAEVVTPTSAEKETANKKAEEASPKKEEAKEVDSKESNTDKTDKDKPAKKDEAKAEADKPETEAGKERAATVNEKLAKKKIVSIDAGRKYFSPEQLKEIIDKAKHYGYTDLHLLVGNDGLRFMLDDMSITANGKTYASDDVKRAIEKGTNDYYNDPNGNHLTESQMTDLINYAKDKGIGLIPTVNSPGHMDAILNAMKELGIQNPNFSYFGKKSARTVDLDNEQAVAFTKALIDKYAAYFAKKTEIFNIGLDEYANDATDAKGWSVLQADKYYPNEGYPVKGYEKFIAYANDLARIVKSHGLKPMAFNDGIYYNSDTSFGSFDKDIIVSMWTGGWGGYDVASSKLLAEKGHQILNTNDAWYYVLGRNADGQGWYNLDQGLNGIKNTPITSVPKTEGADIPIIGGMVAAWADTPSARYSPSRLFKLMRHFANANAEYFAADYESAEQALNEVPKDLNRYTAESVTAVKEAEKAIRSLDSNLSRAQQDTIDQAIAKLQETVNNLTLTPEALKEEEAKREVEKLAKNKVISIDAGRKYFTLNQLKRIVDKASELGYSDVHLLLGNDGLRFLLDDMTITANGKTYASDDVKKAIIEGTKAYYDDPNGTALTQAEVTELIEYAKSKDIGLIPAINSPGHMDAMLVAMEKLGIKNPQAHFDKVSKTTMDLKNEEAMNFVKALIGKYMDFFAGKTKIFNFGTDEYANDATSAQGWYYLKWYQLYGKFAEYANTLAAMAKERGLQPMAFNDGFYYEDKDDVQFDKDVLISYWSKGWWGYNLASPQYLASKGYKFLNTNGDWYYILGQKPEDGGGFLKKAIENTGKTPFNQLASTKYPEVDLPTVGSMLSIWADRPSAEYKEEEIFELMTAFADHNKDYFRANYNALREELAKIPTNLEGYSKESLEALDAAKTALNYNLNRNKQAELDTLVANLKAALQGLKPAATHSGSLDENEVAANVETRPELITRTEEIPFEVIKKENPNLPAGQENIITAGVKGERTHYISVLTENGKTTETVLDSQVTKEVINQVVEVGAPVTHKGDESGLAPTTEVKPRLDIQKEEIPFTTVTRENPLLLKGKTQVITKGVNGHRSNFYSVSTSADGKEVKTLVNSVVAQEAVTQIVEVGTMVTHVGDENGQAAIAEEKPKLEIPSQPAPSTAPAEESKALPQDPAPVVTEKKLPETGTHDSAGLVVAGLMSTLAAYGLTKRKED

SEQ ID NO: 211 - protein, 102 aa, Streptococcus pneumoniae
  MISC_FEATURE: AnrP79161
MANKKIRIRLKAYEHRTLDTAAAKIVESATRTGAQVAGPIPLPTERSLYTIIRATHKYKDSREQFEMRTHKRLIDIVNPTQKTVDALMKLDLPSGVNVEIKL

SEQ ID NO: 212 - protein, 207 aa, Streptococcus pneumoniae
  MISC_FEATURE: AnrP480781
MANVTLFDQTGKEAGQVVLSDAVFGIEPNESVVFDVIISQRASLRQGTHAVKNRSAVSGGGRKPWRQKGTGRARQGSIRSPQWRGGGVVFGPTPRSYGYKLPQKVRRLALKSVYSEKVAENKFVAVDALSFTAPKTAEFAKVLAALSIDSKVLVILEEGNEFAALSARNLPNVKVATATTASVLDIANSDKLLVTQAAISKIEEVLA

SEQ ID NO: 213 - protein, 98 aa, Streptococcus pneumoniae
  MISC_FEATURE: AnrP378449
MNLYDVIKKPVITESSMAQLEAGKYVFEVDTRAHKLLIKQAVEAAFEGVKVANVNTINVKPKAKRVGRYTGFTNKTKKAIITLTADSKAIELFAAEAE

SEQ ID NO: 214 - protein, 68 aa, Streptococcus pneumoniae
  MISC_FEATURE: AnrP271322
MKLNEVKEFVKELRGLSQEELAKRENELKKELFELRFQAATGQLEQTARLKEVKKQIARIKTVQSEAK

SEQ ID NO: 215 - protein, 122 aa, Streptococcus pneumoniae
  MISC_FEATURE: AnrP19648
MIQTETRLKVADNSGAREILTIKVLGGSGRKFANIGDVIVASVKQATPGGAVKKGDVVKAVIVRTKSGARRADGSYIKFDENAAVIIREDKTPRGTRIFGPVARELREGGFMKIVSLAPEVL

SEQ ID NO: 216 - protein, 101 aa, Streptococcus pneumoniae
  MISC_FEATURE: AnrP635629
MFVKKGDKVRVIAGKDKGTEAVVLTALPKVNKVIVEGVNIVKKHQRPTNELPQGGIIEKEAAIHVSNVQVLDKNGVAGRVGYKFVDGKKVRYNKKSGEVLD

SEQ ID NO: 217 - protein, 180 aa, Streptococcus pneumoniae
  MISC_FEATURE: AnrP122681
MANRLKEKYLNEVVPALTEQFNYSSVMAVPKVDKIVLNMGVGEAVSNAKSLEKAAEELALISGQKPLITKAKKSIAGFRLREGVAIGAKVTLRGERMYEFLDKLVSVSLPRVRDFHGVPTKSFDGRGNYTLGVKEQLIFPEINFDDVDKTRGLDIVIVTTANTDEESRALLTGLGMPFAK

SEQ ID NO: 218 - protein, 132 aa, Streptococcus pneumoniae
  MISC_FEATURE: AnrP311685
MVMTDPIADFLTRIRNANQAKHEVLEVPASNIKKGIAEILKREGFVKNVEIIEDDKQGVIRVFLKYGPNGEKVITNLKRVSKPGLRVYKKREDLPKVLNGLGIAILSTSEGLLTDKEARQKNVGGEVIAYVW

SEQ ID NO: 219 - protein, 90 aa, Streptococcus pneumoniae
  MISC_FEATURE: AnrP199123
MLSLCLEASNRNLWRCFCVAKDDVIEVEGKVVDTMPNAMFTVELENGHQILATVSGKIRKNYIRILAGDRVTVEMSPYDLTRGRITYRFK

SEQ ID NO: 220 - protein, 311 aa, Streptococcus pneumoniae
  MISC_FEATURE: AnrP449861
MIEFEKPNITKIDENKDYGKFVIEPLERGYGTTLGNSLRRVLLASLPGAAVTSINIDGVLHEFDTVPGVREDVMQIILNIKGIAVKSYVEDEKIIELDVEGPAEVTAGDILTDSDIEIVNPDHYLFTIGEGSSLKATMTVNSGRGYVPADENKKDNAPVGTLAVDSIYTPVTKVNYQVEPARVGSNDGFDKLTLEILTNGTIIPEDALGLSARILTEHLDLFTNLTEIAKSTEVMKEADTESDDRILDRTIEELDLSVRSYNCLKRAGINTVHDLTEKSEAEMMKVRNLGRKSLEEVKLKLIDLGLGLKDK

SEQ ID NO: 221 - protein, 338 aa, Streptococcus pneumoniae
  MISC_FEATURE: AnrP498702
MKLLKKMMQVLLAVFFFGLLATNTVFANTTGGRFVDKDNRKYYVKDDHKAIYWHKIDGKTYYFGDIGEMVVGWQYLEIPGTGYRDNLFDNQPVNEIGLQEKWYYFGQDGALLEQTDKQVLEAKTSENTGKVYGEQYPLSAEKRTYYFDNNYAVKTGWIYEDGNWYYLNKLGNFGDDSYNPLPIGEVAKGWTQDFHVTIDIDRSKPAPWYYLDASGKMLTDWQKVNGKWYYFGSSGSMATGWKYVRGKWYYLDNKNGDMKTGWQYLGNKWYYLRSSGAMVTGWYQDGLTWYYLNAGNGDMKTGWFQVNGKWYYAYSSGALAVNTTVDGYSVNYNGEWVQ

SEQ ID NO: 222 - protein, 340 aa, Streptococcus pneumoniae
  MISC_FEATURE: AnrP973350
MKLLKKMMQVALAVFFFGLLATNTVFANTTGGRFVDKDNRKYYVKDDHKAIYWHKIDGKTYYFGDIGEMVVGWQYLEIPGTGYRDNLFDNQPVNEIGLQEKWYYFGQDGALLEQTDKQVLEAKTSENTGKVYGEQYPLSAEKRTYYFDNNYAVKTGWIYEEGHWYYLNKLGNFGDDSYNPLPIGEVAKGWTQDFHVTIDIDRSKPAPWYYLDASGKMLTDWQKVNGKWYYFGSSGSMATGWKYVRGKWYYLDNKNGDMKTGWQYLGNKWYYLRSSGAMVTGWYQDGSTWYYLDPSNGDMKIGWTKVNGKWYYLNSNGAMVTGSQTIDGKVYNFASSGEWI

SEQ ID NO: 223 - protein, 332 aa, Streptococcus pneumoniae
  MISC_FEATURE: AnrP210688
MKILKKTMQVGLTVFFFGLLGTSTVFADDSEGWQFVQENGRTYYKKGDLKETYWRVIDGKYYYFDSLSGEMVVGWQYIPFPSKGSTIGPYPNGIRLEGFPKSEWYYFDKNGVLQEFVGWKTLEIKTKDSVGRKYGEKREDSEDKEEKRYYTNYYFNQNHSLETGWLYDQSNWYYLAKTEINGENYLGGERRAGWINDDSTWYYLDPTTGIMQTGWQYLGNKWYYLRSSGAMATGWYQEGTTWYYLDHPNGDMKTGWQNLGNKWYYLRSSGAMATGWYQDGSTWYYLNAGNGDMKTGWFQVNGNWYYAYSSGALAVNTTVDGYSVNYNGEWVR

SEQ ID NO: 224 - protein, 427 aa, Streptococcus pneumoniae
  MISC_FEATURE: AnrP449261
MSVSFENKETNRGVLTFTISQDQIKPELDRVFKSVKKSLNVPGFRKGHLPRPIFDQKFGEEALYQDAMNALLPNAYEAAVKEAGLEVVAQPKIDVTSMEKGQDWVITAEVVTKPEVKLGDYKNLEVSVDVEKEVTDADVEERIERERNNLAELVIKEAAAENGDTVVIDFVGSIDGVEFDGGKGENFSLGLGSGQFIPGFEDQLVGHSAGETVDVIVTFPEDYQAEDLAGKEAKFVTTIHEVKAKEVPALDDELAKDIDEEVETLADLKEKYRKELAAAKEETYKDAVEGAAIDTAVENAEIVELPEEMIHEEVHRSVNEFLGNLQRQGINPDMYFQITGTTQEDLHNQYQAEAESRTKTNLVIEAVAKAEGFDASEEEIQKEVEQLAADYNMEVAQVQNLLSADMLKHDITIKKAVELITSTATVK

SEQ ID NO: 225 - protein, 238 aa, Streptococcus pneumoniae
  MISC_FEATURE: AnrP551355
MKKRYLVLTALLALSLAACSQEKTKNEDGETKTEQTAKADGTVGSKSQGAAQKKAEVVNKGDYYSIQGKYDEIIVANKHYPLSKDYNPGENPTAKAELVKLIKAMQEAGFPISDHYSGFRSYETQTKLYQDYVNQDGKAAADRYSARPGYSEHQTGLAFDVIGTDGDLVTEEKAAQWLLDHAADYGFVVRYLKGKEKETGYMAEEWHLRYVGKEAKEIAASGLSLEEYYGFEGGDYVD

SEQ ID NO: 226 - protein, 2140 aa, Streptococcus pneumoniae
  MISC_FEATURE: AnrP32375
MKKSTVLSLTTAAVILAAYAPNEVVLADTSSSEDALNISDKEKVAENKEKHENIHSAMETSQDFKEKKTAVIKEKEVVSKNPVIDNNTSNEEAKIKEENSNKSQGDYTDSFVNKNTENPKKEDKVVYIAEFKDKESGEKAIKELSSLKNTKVLYTYDRIFNGSAIETTPDNLDKIKQIEGISSVERAQKVQPMMNHARKEIGVEEAIDYLKSINAPFGKNFDGRGMVISNIDTGTDYRHKAMRIDDDAKASMRFKKEDLKGTDKNYWLSDKIPHAFNYYNGGKITVEKYDDGRDYFDPHGMHIAGILAGNDTEQDIKNFNGIDGIAPNAQIFSYKMYSDAGSGFAGDETMFHAIEDSIKHNVDVVSVSSGFTGTGLVGEKYWQAIRALRKAGIPMVVATGNYATSASSSSWDLVANNHLKMTDTGNVTRTAAHEDAIAVASAKNQTVEFDKVNIGGESFKYRNIGAFFDKSKITTNEDGTKAPSKLKFVYIGKGQDQDLIGLDLRGKIAVMDRIYTKDLKNAFKKAMDKGARAIMVVNTVNYYNRDNWTELPAMGYEADEGTKSQVFSISGDDGVKLWNMINPDKKTEVKRNNKEDFKDKLEQYYPIDMESFNSNKPNVGDEKEIDFKFAPDTDKELYKEDIIVPAGSTSWGPRIDLLLKPDVSAPGKNIKSTLNVINGKSTYGYMSGTSMATPIVAASTVLIRPKLKEMLERPVLKNLKGDDKIDLTSLTKIALQNTARPMMDATSWKEKSQYFASPRQQGAGLINVANALRNEVVATFKNTDSKGLVNSYGSISLKEIKGDKKYFTIKLHNTSNRPLTFKVSASAITTDSLTDRLKLDETYKDEKSPDGKQIVPEIHPEKVKGANITFEHDTFTIGANSSFDLNAVINVGEAKNKNKFVESFIHFESVEEMEALNSNGKKINFQPSLSMPLMGFAGNWNHEPILDKWAWEEGSRSKTLGGYDDDGKPKIPGTLNKGIGGEHGIDKFNPAGVIQNRKDKNTTSLDQNPELFAFNNEGINAPSSSGSKIANIYPLDSNGNPQDAQLERGLTPSPLVLRSAEEGLISIVNTNKEGENQRDLKVISREHFIRGILNSKSNDAKGIKSSKLKVWGDLKWDGLIYNPRGREENAPESKDNQDPATKIRGQFEPIAEGQYFYKFKYRLTKDYPWQVSYIPVKIDNTAPKIVSVDFSNPEKIKLITKDTYHKVKDQYKNETLFARDQKEHPEKFDEIANEVWYAGAALVNEDGEVEKNLEVTYAGEGQGRNRKLDKDGNTIYEIKGAGDLRGKIIEVIALDGSSNFTKIHRIKFANQADEKGMISYYLVDPDQDSSKYQKLGEIAESKFKNLGNGKEGSLKKDTTGVEHHHQENEESIKEKSSFTIDRNISTIRDFENKDLKKLIKKKFREVDDFTSETGKRMEEYDYKYDDKGNIIAYDDGTDLEYETEKLDEIKSKIYGVLSPSKDGHFEILGKISNVSKNAKVYYGNNYKSIEIKATKYDFHSKTMTFDLYANINDIVDGLAFAGDMRLFVKDNDQKKAEIKIRMPEKIKETKSEYPYVSSYGNVIELGEGDLSKNKPDNLTKMESGKIYSDSEKQQYLLKDNIILRKGYALKVTTYNPGKTDMLEGNGVYSKEDIAKIQKANPNLRALSETTIYADSRNVEDGRSTQSVLMSALDGFNIIRYQVFTFKMNDKGEAIDKDGNLVTDSSKLVLFGKDDKEYTGEDKFNVEAIKEDGSMLFIDTKPVNLSMDKNYFNPSKSNKIYVRNPEFYLRGKISDKGGFNWELRVNESVVDNYLIYGDLHIDNTRDFNIKLNVKDGDIMDWGMKDYKANGFPDKVTDMDGNVYLQTGYSDLNAKAVGVHYQFLYDNVKPEVNIDPKGNTSIEYADGKSVVFNINDKRNNGFDGEIQEQHIYINGKEYTSFNDIKQIIDKTLNIKIVVKDFARNTTVKEFILNKDTGEVSELKPHRVTVTIQNGKEMSSTIVSEEDFILPVYKGELEKGYQFDGWEISGFEGKKDAGYVINLSKDTFIKPVFKKIEEKKEEENKPTFDVSKKKDNPQVNHSQLNESHRKEDLQREEHSQKSDSTKDVTATVLDKNNISSKSTTNNPNKLPKTGTASGAQTLLAAGIMFIVGIFLGLKKKNQD

SEQ ID NO: 227 - protein, 2233 aa, Streptococcus pneumoniae
  MISC_FEATURE: AnrP710228
MGKGHWNRKRVYSIRKFAVGACSVMIGTCAVLLGGNIAGESVVYADETLITHTAEKPKEEKMIVEEKADKALETKNIVERTEQSEPSSTEAIASEKKEDEAVTPKEEKVSAKPEEKAPRIESQASNQEKPLKEDAKAVTNEEVNQMIEDRKVDFNQNWYFKLNANSKEAIKPDADVSTWKKLDLPYDWSIFNDFDHESPAQNEGGQLNGGEAWYRKTFKLDEKDLKKNVRLTFDGVYMDSQVYVNGQLVGHYPNGYNQFSYDITKYLQKDGRENVIAVHAVNKQPSSRWYSGSGIYRDVTLQVTDKVHVEKNGTTILTPKLEEQQHGKVETHVTSKIVNTDDKDHELVAEYQIVERGGHAVTGLVRTASRTLKAHESTSLDAILEVERPKLWTVLNDKPALYELITRVYRDGQLVDAKKDLFGYRYYHWTPNEGFSLNGERIKFHGVSLHHDHGALGAEENYKAEYRRLKQMKEMGVNSIRTTHNPASEQTLQIAAELGLLVQEEAFDTWYGGKKPYDYGRFFEKDATHPEARKGEKWSDFDLRTMVERGKNNPAIFMWSIGNEIGEANGDAHSLATVKRLVKVIKDVDKTRYVTMGADKFRFGNGSGGHEKIADELDAVGFNYSEDNYKALRAKHPKWLIYGSETSSATRTRGSYYRPERELKHSNGPERNYEQSDYGNDRVGWGKTATASWTFDRDNAGYAGQFIWTGTDYIGEPTPWHNQNQTPVKSSYFGIVDTAGIPKHDFYLYQSQWVSVKKKPMVHLLPHWNWENKELASKVADSEGKIPVRAYSNASSVELFLNGKSLGLKTFNKKQTSDGRTYQEGANANELYLEWKVAYQPGTLEAIARDESGKEIARDKITTAGKPAAVRLIKEDHAIAADGKDLTYIYYEIVDSQGNVVPTANNLVRFQLHGQGQLVGVDNGEQASRERYKAQADGSWIRKAFNGKGVAIVKSTEQAGKFTLTAHSDLLKSNQVTVFTGKKEGQEKTVLGTEVPKVQTIIGEAPEMPTTVPFVYSDGSRAERPVTWSSVDVSKPGIVTVKGMADGREVEARVEVIALKSELPVVKRIAPNTDLNSVDKSVSYVLIDGSVEEYEVDKWEIAEEDKAKLAIPGSRIQATGYLEGQPIHATLVVEEGNPAAPAVPTVTVGGEAVTGLTSQKPMQYRTLAYGAKLPEVTASAKNAAVTVLQASAANGMRASIFIQPKDGGPLQTYAIQFLEEAPKIAHLSLQVEKADSLKEDQTVKLSVRAHYQDGTQAVLPADKVTFSTSGEGEVAIRKGMLELHKPGAVTLNAEYEGAKDQVELTIQANTEKKIAQSIRPVNVVTDLHQEPSLPATVTVEYDKGFPKTHKVTWQAIPKEKLDSYQTFEVLGKVEGIDLEARAKVSVEGIVSVEEVSVTTPIAEAPQLPESVRTYDSNGHVSSAKVAWDAIRPEQYAKEGVFTVNGRLEGTQLTTKLHVRVSAQTEQGANISDQWTGSELPLAFASDSNPSDPVSNVNDKLISYNNQPANRWTNWNRTNPEASVGVLFGDSGILSKRSVDNLSVGFHEDHGVGVPKSYVIEYYVGKTVPTAPKNPSFVGNEDHVFNDSANWKPVTNLKAPAQLKAGEMNHFSFDKVETYAVRIRMVKADNKRGTSITEVQIFAKQVAAAKQGQTRIQVDGKDLANFNPDLTDYYLESVDGKVPAVTASVSNNGLATVVPSVREGEPVRVIAKAENGDILGEYRLHFTKDKSLLSHKPVAAVKQARLLQVGQALELPTKVPVYFTGKDGYETKDLTVEWEEVPAENLTKAGQFTVRGRVLGSNLVAEITVRVTDKLGETLSDNPNYDENSNQAFASATNDIDKNSHDRVDYLNDGDHSENRRWTNWSPTPSSNPEVSAGVIFRENGKIVERTVTQGKVQFFADSGTDAPSKLVLERYVGPEFEVPTYYSNYQAYDADHPFNNPENWEAVPYRADKDIAAGDEINVTFKAIKAKAMRWRMERKADKSGVAMIEMTFLAPSELPQESTQSKILVDGKELADFAENRQDYQITYKGQRPKVSVEENNQVASTVVDSGEDSFPVLVRLVSESGKQVKEYRIHLTKEKPVSEKTVAAVQEDLPKIEFVEKDLAYKTVEKKDSTLYLGETRVEQEGKVGKERIFTAINPDGSKEEKLREVVEVPTDRIVLVGTKPVAQEAKKPQVSEKADTKPIDSSEASQTNKAQLPSTGSAASQAAVAAGLTLLGLSAGLVVTKGKKED

SEQ ID NO: 228 - protein, 263 aa, Streptococcus pneumoniae
  MISC_FEATURE: AnrP723238
MTYLPVALTIAGTDPSGGAGIMADLKSFQARDVYGMAVVTSLVAQNTRGVQLIEHVSPQMLKAQLESVFSDIPPQAVKTGMLATTEIMEIIQPYLKKLDCPYVLDPVMVATSGDALIDSNARDYLKTNLLPLATIITPNLPEAEEIVGFSIHDPEDMQRAGRLILKEFGPQSVVIKGGHLKGGAKDFLFTKNEQFVWESPRIQTCHTHGTGCTFAAVITAELAKGKSLYQAVDKAKAFITKAIQDAPQLGHGSGPVNHTTFKD

SEQ ID NO: 229 - protein, 350 aa, Streptococcus pneumoniae
  MISC_FEATURE: AnrP267094
MNKKQWLGLGLVAVAAVGLAACGNRSSRNAASSSDVKTKAAIVTDTGGVDDKSFNQSAWEGLQAWGKEHNLSKDNGFTYFQSTSEADYANNLQQAAGSYNLIFGVGFALNNAVKDAAKEHTDLNYVLIDDVIKDQKNVASVTFADNESGYLAGVAAAKTTKTKQVGFVGGIESEVISRFEAGFKAGVASVDPSIKVQVDYAGSFGDAAKGKTIAAAQYAAGADIVYQVAGGTGAGVFAEAKSLNESRPENEKVWVIGVDRDQEAEGKYTSKDGKESNFVLVSTLKQVGTTVKDISNKAERGEFPGGQVIVYSLKDKGVDLAVTNLSEEGKKAVEDAKAKILDGSVKVPEK

SEQ ID NO: 230 - protein, 313 aa, Streptococcus pneumoniae
  MISC_FEATURE: AnrP736063
MKKKLLAGAITLLSVATLAACSKGSEGADLISMKGDVITEHQFYEQVKSNPSAQQVLLNMTIQKVFEKQYGSELDDKEVDDTIAEEKKQYGENYQRVLSQAGMTLETRKAQIRTSKLVELAVKKVAEAELTDEAYKKAFDEYTPDVTAQIIRLNNEDKAKEVLEKAKAEGADFAQLAKDNSTDEKTKENGGEITFDSASTEVPEQVKKAAFALDVDGVSDVITATGTQAYSSQYYIVKLTKKTEKSSNIDDYKEKLKTVILTQKQNDSTFVQSIIGKELQAANIKVKDQAFQNIFTQYIGGGDSSSSSSTSNE

SEQ ID NO: 231 - protein, 341 aa, Streptococcus pneumoniae
  MISC_FEATURE: AnrP34435
MKNKFFLIAILAMCIVFSACSSNSVKNEENTSKEHAPDKIVLDHAFGQTILDKKPERVATIAWGNHDVALALGIVPVGFSKANYGVSADKGVLPWTEEKIKELNGKANLFDDLDGLNFEAISNSKPDVILAGYSGITKEDYDTLSKIAPVAAYKSKPWQTLWRDMIKIDSKALGMEKEGDELIKNTEARISKELEKHPEIKGKIKGKKVLFTMINAADTSKFWIYTSKDPRANYLTDLGLVFPESLKEFESEDSFAKEISAEEANKINDADVIITYGDDKTLEALQKDPLLGKINAIKNGAVAVIPDNTPLAASCTPTPLSINYTIEEYLNLLGNACKNAK

SEQ ID NO: 232 - protein, 434 aa, Streptococcus pneumoniae
  MISC_FEATURE: AnrP172568
MSIITDVYAREVLDSRGNPTLEVEVYTESGAFGRGMVPSGASTGEHEAVELRDGDKSRYGGLGTQKAVDNVNNIIAEAIIGYDVRDQQAIDRAMIALDGTPNKGKLGANAILGVSIAVARAAADYLEIPLYSYLGGFNTKALPTPMMNIINGGSHSDAPIAFQEFMILPVGAPTFKEALRYGAEIFHALKKILKSRGLETAVGDEGGFAPRFEGTEDGVETILAAIEAAGYVPGKDVFLGFDCASSEFYDKERKVYDYTKFEGEGAAVRTSAEQIDYLEELVNKYPIITIEDGMDENDWDGWKALTERLGKKVQLVGDDFFVTNTDYLARGIQEGAANSILIKVNQIGTLTETFEAIEMAKEAGYTAVVSHRSGETEDSTIADIAVATNAGQIKTGSLSRTDRIAKYNQLLRIEDQLGEVAEYRGLKSFYNLKK

SEQ ID NO: 233 - protein, 1963 aa, Streptococcus pneumoniae
  MISC_FEATURE: AnrP559469
MEKYFGEKQERFSFRKLSVGLVSATISSLFFMSVLASSSVDAQETAGVHYKYVADSELSSEEKKQLVYDIPTYVENDDETYYLVYKLNSQNQLAELPNTGSKNERQALVAGASLAALGILIFAVSKKKVKNKTVLHLVLVAGMGNGVLVSVHALENHLLLNYNTDYELTSGEKLPLPKEISGYTYIGYIKEGKTTSDFEVSNQEKSAATPTKQQKVDYNVTPNFVDHPSTVQAIQEQTPVSSTKPTEVQVVEKPFSTELINPRKEEKQSSDSQEQLAEHKNLETKKEEKISPKEKTGVNTLNPQDEVLSGQLNKPELLYREETIETKIDFQEEIQENPDLAEGTVRVKQEGKLGKKVEIVRIFSVNKEEVSREIVSTSTTAPSPRIVEKGTKKTQVIKEQPETGVEHKDVQSGAIVEPAIQPELPEAVVSDKGEPEVQPTLPEAVVTDKGETEVQPESPDTVVSDKGEPEQVAPLPEYKGNIEQVKPETPVEKTKEQGPEKTEEVPVKPTEETPVNPNEGTTEGTSIQEAENPVQPAEESTTNSEKVSPDTSSENTGEVSSNPSDSTTSVGESNKPEHNDSKNENSEKTVEEVPVNPNEGTVEGTSNQETEKPVQPAEETQTNSGKIANENTGEVSNKPSDSKPPVEESNQPEKNGTATKPENSGNTTSENGQTEPEKKLELRNVSDIELYSQTNGTYRQHVSLDGIPENTDTYFVKVKSSAFKDVYIPVASITEEKRNGQSVYKITAKAEKLQQELENKYVDNFTFYLDKKAKEENTNFTSFSNLVKAINQNPSGTYHLAASLNANEVELGPDERSYIKDTFTGRLIGEKDGKNYAIYNLKKPLFENLSGATVEKLSLKNVAISGKNDIGSLANEATNGTKIKQVHVDGVLAGERGVGGLLAKADQSSIAESSFKGRIVNTYETTDAYNIGGLVGHLTGKNASIAKSKATVTISSNTNRSDQTVGGLAGLVDQDAHIQNSYAEGDINNVKHFGKVAGVAGYLWDRTSGEEKHAGELTNVLSDVNVTNGNAITGYHYTGMKVANTFSSKANRVFNVTLEKDEVVSKESFEERGTMLDASQIVSKKAEINPLTLPTVEPLSTSGKKDSDFSKIAHYQANRALVYKNIEKLLPFYNKSTIVKYGNLVKENSLLYQKELLSAVMMKDDQVITDIVSNKQTANKLLLHYNDHSSEKFDLKYQTDFANLAEYNLGNTGLLYTPNQFLYDRDSIVKEVLPELQKLDYQSDAIRKTLGISPEVKLTELYLEDQFSKTKQNLGDSLKKLLSADAGLASDNSVTRGYLVDKIKNNKEALLLGLTYLERWYNFNYGQVNVKDLVMYHPDFFGKGNTSPLDTLIELGKSGFNNLLAKNNVDTYGISLASQHGATDLFSTLEHYRKVFLPNTSNNDWFKSETKAYIVEEKSTIEEVKTKQGLAGTKYSIGVYDRITSATWKYRNMVLPLLTLPERSVFVISTMSSLGFGAYDRYRSSDHKAGKALNDFVEENARETAKRQRDHYDYWYRILDEQSREKLYRTILLYDAYKFGDDTTSGKATAEAKFDSSNPAMKNFFGPVGNKVVHNQHGAYATGDGVYYMSYRMLDKDGAITYTHEMTHDSDQDIYLGGYGRRNGLGPEFFAKGLLQAPDQPSDATITINSILKHSKSDSTEGSRLQVLDPTERFQNAADLQNYVHNMFDLIYMMEYLEGQSIVNKLSVYQKMAALRKIENKYVKDPADGNEVYATNVVKELTEAEARNLNSFESLIDHNILSAREYQSGDYERNGYYTIKLFAPIYSALSSEKGTPGDLMGRRIAYELLAAKGFKDGMVPYISNQYEEDAKQQGQTINLYGKERGLVTDELVLKKVFDGKYKTWAEFKTAMYQERVDQFGNLKQVTFKDPTKPWPSYGTKTINNVDELQALMDQAVLKDAEGPRWSNYDPEIDSAVHKLKRAIFKAYLDQTNDFRSSIFENKK

SEQ ID NO: 234 - protein, 398 aa, Streptococcus pneumoniae
  MISC_FEATURE: AnrP229477
MAKEKYDRSKPHVNIGTIGHVDHGKTTLTAAITTVLARRLPSAVNQPKDYASIDAAPEERERGITINTAHVEYETEKRHYAHIDAPGHADYVKNMITGAAQMDGAILVVASTDGPMPQTREHILLSRQVGVKHLIVFMNKIDLVDDEELLELVEMEIRDLLSEYDFPGDDLPVIQGSALKALEGDSKYEDIIMELMNTVDEYIPEPERDTEKPLLLPVEDVFSITGRGTVASGRIDRGTVRVNDEIEIVGIKEETQKAVVTGVEMFRKQLDEGLAGDNVGVLLRGVQRDEIERGQVIAKPGSINPHTKFKGEVYILTKEEGGRHTPFFNNYRPQFYFRTTDVTGSIELPAGTEMVMPGDNVTIDVELIHPIAVEQGTTFSIREGGRTVGSGMVTEIEA

SEQ ID NO: 235 - protein, 309 aa, Streptococcus pneumoniae
  MISC_FEATURE: AnrP96076
MKKLGTLLVLFLSAIILVACASGKKDTTSGQKLKVVATNSIIADITKNIAGDKIDLHSIVPIGQDPHEYEPLPEDVKKTSEADLIFYNGINLETGGNAWFTKLVENAKKTENKDYFAVSDGVDVIYLEGQNEKGKEDPHAWLNLENGIIFAKNIAKQLSAKDPNNKEFYEKNLKEYTDKLDKLDKESKDKFNKIPAEKKLIVTSEGAFKYFSKAYGVPSAYIWEINTEEEGTPEQIKTLVEKLRQTKVPSLFVESSVDDRPMKTVSQDTNIPIYAQIFTDSIAEQGKEGDSYYSMMKYNLDKIAEGLAK

SEQ ID NO: 236 - protein, 163 aa, Streptococcus pneumoniae
  MISC_FEATURE: AnrP118814
MVTFLGNPVSFTGKQLQVGDKALDFSLTTTDLSKKSLADFDGKKKVLSVVPSIDTGICSTQTRRFNEELAGLDNTVVLTVSMDLPFAQKRWCGAEGLDNAIMLSDYFDHSFGRDYALLINEWHLLARAVFVLDTDNTIRYVEYVDNINSEPNFEAAIAAAKAL

SEQ ID NO: 237 - protein, 419 aa, Streptococcus pneumoniae
  MISC_FEATURE: AnrP470544
MTFSFDTAAAQGAVIKVIGVGGGGGNAINRMVDEGVTGVEFIAANTDVQALSSTKAETVIQLGPKLTRGLGAGGQPEVGRKAAEESEETLTEAISGADMVFITAGMGGGSGTGAAPVIARIAKDLGALTVGVVTRPFGFEGSKRGQFAVEGINQLREHVDTLLIISNNNLLEIVDKKTPLLEALSEADNVLRQGVQGITDLITNPGLINLDFADVKTVMANKGNALMGIGIGSGEERVVEAARKAIYSPLLETTIDGAEDVIVNVTGGLDLTLIEAEEASQIVNQAAGQGVNIWLGTSIDESMRDEIRVTVVATGVRQDRVEKVVAPQARSATNYRETVKPAHSHGFDRHFDMAETVELPKQNPRRLEPTQASAFGDWDLRRESIVRTTDSVVSPVERFEAPISQDEDELDTPPFFKNR

SEQ ID NO: 238 - protein, 442 aa, Streptococcus pneumoniae
  MISC_FEATURE: AnrP793162
MKFRKLACTVLAGAAVLGLAACGNSGGSKDAAKSGGDGAKTEITWWAFPVFTQEKTGDGVGTYEKSIIEAFEKANPDIKVKLETIDFKSGPEKITTAIEAGTAPDVLFDAPGRIIQYGKNGKLAELNDLFTDEFVKDVNNENIVQASKAGDKAYMYPISSAPFYMAMNKKMLEDAGVANLVKEGWTTDDFEKVLKALKDKGYTPGSLFSSGQGGDQGTRAFISNLYSGSVTDEKVSKYTTDDPKFVKGLEKATSWIKDNLINNGSQFDGGADIQNFANGQTSYTILWAPAQNGIQAKLLEASKVEVVEVPFPSDEGKPALEYLVNGFAVFNNKDDKKVAASKKFIQFIADDKEWGPKDVVRTGAFPVRTSFGKLYEDKRMETISGWTQYYSPYYNTIDGFAEMRTLWFPMLQSVSNGDEKPADALKAFTEKANETIKKAMKQ

SEQ ID NO: 239 - protein, 506 aa, Streptococcus pneumoniae
  MISC_FEATURE: AnrP819166
MTNLIATFQDRFSDWLTALSQHLQLSLLTLLLAILLAIPLAVFLRYHEKLADWVLQIAGIFQTIPSLALLGLFIPLMGIGTLPALTALVIYAIFPILQNTITGLKGIDPNLQEAGIAFGMTRWERLKKFEIPLAMPVIMSGIRTAAVLIIGTATLAALIGAGGLGSFILLGIDRNNASLILIGALSSAVLAIAFNFLLKVMEKAKLRTIFSGFALVALLLGLSYSPALLVQKEKENLVIAGKIGPEPEILANMYKLLIEENTSMTATVKPNFGKTSFLYEALKKGDIDIYPEFTGTVTESLLQPSPKVSHEPEQVYQVARDGIAKQDHLAYLKPMSYQNTYAVAVPKKIAQEYGLKTISDLKKVEGQLKAGFTLEFNDREDGNKGLQSMYGLNLNVATIEPALRYQAIQSGDIQITDAYSTDAELERYDLQVLEDDKQLFPPYQGAPLMKEALLKKHPELERVLNTLAGKITESQMSQLNYQVGVEGKSAKQVAKEFLQEQGLLKK

SEQ ID NO: 240 - protein, 359 aa, Streptococcus pneumoniae
  MISC_FEATURE: AnrP373238
MICSDSSYSFHNKNFMIFIRRKSLMVVKVGINGFGRIGRLAFRRIQNVEGVEVTRINDLTDPVMLAHLLKYDTTQGRFDGTVEVKEGGFEVNGKFIKVSAERDPEQIDWATDGVEIVLEATGFFAKKEAAEKHLKGGAKKVVITAPGGNDVKTVVFNTNHDVLDGTETVISGASCTTNCLAPMAKALQDNFGVVEGLMTTIHAYTGDQMILDGPHRGGDLRRARAGAANIVPNSTGAAKAIGLVIPELNGKLDGSAQRVPTPTGSVTELVAVLEKNVTVDEVNAAMKAASNESYGYTEDPIVSSDIVGMSYGSLFDATQTKVLDVDGKQLVKVVSWYDNEMSYTAQLVRTLEYFAKIAK

SEQ ID NO: 241 - protein, 299 aa, Streptococcus pneumoniae
  MISC_FEATURE: AnrP377050
MTSKVRKAVIPAAGLGTRFLPATKALAKEMLPIVDKPTIQFIVEEALKSGIEDILVVTGKSKRSIEDHFDSNFELEYNLKEKGKTDLLKLVDKTTDMRLHFIRQTHPRGLGDAVLQAKAFVGNEPFVVMLGDDLMDITDEKAVPLTKQLMDDYERTHASTIAVMPVPHDEVSAYGVIAPQGEGKDGLYSVETFVEKPAPEDAPSDLAIIGRYLLTPEIFEILEKQAPGAGNEIQLTDAIDTLNKTQRVFAREFKGARYDVGDKFGFMKTSIDYALKHPQVKDDLKNYLIQLGKELTEKE

SEQ ID NO: 242 - protein, 501 aa, Streptococcus pneumoniae
  MISC_FEATURE: AnrP149458
MKKISLLLASLCALFLVACSNQKQADGKLNIVTTFYPVYEFTKQVAGDTANVELLIGAGTEPHEYEPSAKAVAKIQDADTFVYENENMETWVPKLLDTLDKKKVKTIKATGDMLLLPGGEEEEGDHDHGEEGHHHEFDPHVWLSPVRAIKLVEHIRDSLSADYPDKKETFEKNAAAYIEKLQSLDKAYAEGLSQAKQKSFVTQHAAFNYLALDYGLKQVAISGLSPDAEPSAARLAELTEYVKKNKIAYIYFEENASQALANTLSKEAGVKTDVLNPLESLTEEDTKAGENYISVMEKNLKALKQTTDQEGPAIEPEKAEDTKTVQNGYFEDAAVKDRTLSDYAGNWQSVYPFLEDGTFDQVFDYKAKLTGKMTQAEYKAYYTKGYQTDVTKINITDNTMEFVQGGQSKKYTYKYVGKKILTYKKGNRGVRFLFEATDADAGQFKYVQFSDHNIAPVKAEHFHIFFGGTSQETLFEEMDNWPTYYPDNLSGQEIAQEMLAH

SEQ ID NO: 243 - protein, 696 aa, Streptococcus pneumoniae
  MISC_FEATURE: AnrP354979
MFASKSERKVHYSIRKFSIGVASVVVASLFLGGVVHAEEVGGKNTPTDTSSGQDISKKYADEVESHLKKILSEIQTQLDRKRHTETVALINELQGIKKTYLYNLNVLKEKSELPSKIKAKLDVAFDQFKKDTLKPGEKVAEAQKKVAEAKKKAEDQKEEDRRNYPTNTYKTLELDIAESDVKVKEAELETSKRGAKPRNEEKIKKAKAKVESEKAEAIRLEEIKTDREEAKRKADAKLKEAVEKNAANSEQGEPKRRVKRGVLGEPATPDKKENDAKSSDSSVGEETLPSPSLKPEKKVAEAEKKKAEDQEEEDRRNYPTNTYKTLELDIAESDVKVKEAELELVNEEAKPRNEEKIKKAKAKVESEKAEATRLEKIKTDRKKAEEEAKRKAAEEDKVKEKPAEQPQPAPAPQPEKPAEEPNPAPAPKPEKPADQPKAEKPADQQAEEDYARRSEEEYNRLTQQQPPKPEQPAPAPKTGWKQENGMWYFYNTDGSMATGWLQNNGSWYYLNSNGAMATGWLQYNGSWYYLNANGDMATGWFQYNGSWYYLNANGDMATGWFQYNGSWYYLNANGDMATGWFQYNGSWYYLNANGDMATGWLQYNGSWYYLNSNGAMVTGWLQNNGSWYYLNANGSMATDWVKDGDTWYYLEASGAMKASQWFKVSDKWYYVNGSGALAVNTTVDSYRVNANGEWVN

SEQ ID NO: 244 - protein, 259 aa, Streptococcus pneumoniae
  MISC_FEATURE: AnrP958511
MAVISMKQLLEAGVHFGHQTRRWNPKMAKYIFTERNGIHVIDLQQTVKYADQAYDFMRDAAANDAVVLFVGTKKQAADAVAEEAVRSGQYFINHRWLGGTLTNWGTIQKRIARLKEIKRMEEDGTFEVLPKKEVALLNKQRARLEKFLGGIEDMPRIPDVMYVVDPHKEQIAVKEAKKLGIPVVAMVDTNTDPDDIDVIIPANDDAIRAVKLITAKLADAIIEGRQGEDAVAVEAEFAALETQADSIEEIVEVVEGDNA

SEQ ID NO: 245 - protein, 857 aa, Streptococcus pneumoniae
  MISC_FEATURE: AnrP72782
MKFNPNQRYTRWSIRRLSVGVASVVVASGFFVLVGQPSSVRADGLNPTPGQVLPEETSGTKEGDLSEKPGDTVLTQAKPEGVTGNTNSLPTPTERTEVSEETSPSSLDTLFEKDEEAQKNPELTDVLKETVDTADVDGTQASPAETTPEQVKGGVKENTKDSIDVPAAYLEKAEGKGPFTAGVNQVIPYELFAGDGMLTRLLLKASDNAPWSDNGTAKNPALPPLEGLTKGKYFYEVDLNGNTVGKQGQALIDQLRANGTQTYKATVKVYGNKDGKADLTNLVATKNVDININGLVAKETVQKAVADNVKDSIDVPAAYLEKAKGEGPFTAGVNHVIPYELFAGDGMLTRLLLKASDKAPWSDNGDAKNPALSPLGENVKTKGQYFYQVALDGNVAGKEKQALIDQFRANGTQTYSATVNVYGNKDGKPDLDNIVATKKVTININGLISKETVQKAVADNVKDSIDVPAAYLEKAKGEGPFTAGVNHVIPYELFAGDGMLTRLLLKASDKAPWSDNGDAKNPALSPLGENVKTKGQYFYQLALDGNVAGKEKQALIDQFRANGTQTYSATVNVYGNKDGKPDLDNIVATKKVTININGLISKETVQKAVADNVKDSIDVPAAYLEKAKGEGPFTAGVNHVIPYELFAGDGMLTRLLLKASDKAPWSDNGDAKNPALSPLGENVKTKGQYFYQVALDGNVAGKEKQALIDQFRANGTQTYSATVNVYGNKDGKPDLDNIVATKKVTIKINVKETSDTANGSLSPSNSGSGVTPMNHNHATGTTDSMPADTMTSSTNTMAGENMAASANKMSDTMMSEDKAMLPNTGETQTSMASIGFLGLALAGLLGGLGLKNKKEEN

SEQ ID NO: 246 - protein, 491 aa, Streptococcus pneumoniae
  MISC_FEATURE: AnrP40452
MKNWKKYAFASASVVALAAGLAACGNLTGNSKKAADSGDKPVIKMYQIGDKPDNLDELLANANKIIEEKVGAKLDIQYLGWGDYGKKMSVITSSGENYDIAFADNYIVNAQKGAYADLTELYKKEGKDLYKALDPAYIKGNTVNGKIYAVPVAANVASSQNFAFNGTLLAKYGIDISGVTSYETLEPVLKQIKEKAPDVVPFAIGKVFIPSDNFDYPVANGLPFVIDLEGDTTKVVNRYEVPRFKEHLKTLHKFYEAGYIPKDVATSDTSFDLQQDTWFVREETVGPADYGNSLLSRVANKDIQIKPITNFIKKNQTTQVANFVISNNSKNKEKSMEILNLLNTNPELLNGLVYGPEGKNWEKIEGKENRVRVLDGYKGNTHMGGWNTGNNWILYINENVTDQQIENSKKELAEAKESPALGFIFNTDNVKSEISAIANTMQQFDTAINTGTVDPDKAIPELMEKLKSEGAYEKVLNEMQKQYDEFLKNKK

SEQ ID NO: 247 - protein, 312 aa, Streptococcus pneumoniae
  MISC_FEATURE: AnrP179757
MAEIYLAGGCFWGLEEYFSRISGVLETSVGYANGQVETTNYQLLKETDHAETVQVIYDEKEVSLREILLYYFRVIDPLSINQQGNDRGRQYRTGIYYQDEADLPAIYTVVQEQERMLGRKIAVEVEQLRHYILAEDYHQDYLRKNPSGYCHIDVTDADKPLIDAANYEKPSQEVLKASLSEESYRVTQEAATEAPFTNAYDQTFEEGIYVDITTGEPLFFAKDKFASGCGWPSFSRPISKELIHYYKDLSHGMERIEVRSRSGSAHLGHVFTDGPRELGGLRYCINSASLRFVAKDEMEKAGYGYLLPYLNK

SEQ ID NO: 248 - protein, 194 aa, Streptococcus pneumoniae
  MISC_FEATURE: AnrP835378
ILGAGFVASQPTVVRAEEAEKKAVEAKQKVDAEKYALEAKIAELEYEVQGLEKELKEIDESDSEDYIKEGLRAPLQSKLDAKKAKLSKLEELSDKIDELDAEIAKLEKDVEDFKNSDGEQAEQYLVAAKKDLDAKKAELENTEADLKKAVDEPETPAPAPAPKPAPAPAPTPEAPAPAPKPETPKTGWKQENGM

SEQ ID NO: 249 - protein, 869 aa, Streptococcus pneumoniae
  MISC_FEATURE: AnrP277775
MFASKSERKVHYSIRKFSIGVASVVVASLVMGSVVHATENEGITQVPTSYNKANESQTEHRKAAKQVDEDIKKMLSEIQEYIKKMLSEIQLDKRKDTQNRTLNRKLSAIQTKYLYELRVLKEKSKKEELTSKTKKELDAAFEKFKKEPELTKKLAEAKQKAKAQKEEDFRNYPTNTYKTLELEIAEFDVKVKEADLELVKEEAKPRNEEKIKQAKAKVESKKAEATRLEEIKTERKRAEEEAKRKAGESEEKAAEANQKVDTKEQGKPKRRAKRGVSGELATPDKKENDAKSSDSSVGEETLPSPSLNMANESQTEHRKDVDEYIKKMLSGIQLDRRKQTQNVNLNIKLSAIKTKYLYELSVLKENSKKEELTSKTKAELTAAFEQFKKDTLKPEKKVAEAEKKVEEAKKKAKDQKEEDRRNYPTNTYKTLELEIAESDVKVKEAELELVKEEANESRNEEKIKQAKEKVESKKAEATRLEKIKTDRKKAEEEAKRKAEESEKKAAEAKQKVDAEEYALEAKIAELEYEVQRLEKELKEIDESDSEDYLKEGLRAPLQSKLDTKKAKLSKLEELSDKIDELDVNCNLRSQLKDAEGNNNVEAYFKEGLEKTTAEKKAELEKAEADLKKAVDEPETPAPAPQPAPAPEKPAEKQAPASSPEKPAPAPEKPGPAPEKPAPAPEKPAPTPETPKTGWKQENGMWYFYNTDGSMATGWLQNNGSWYYLNSNGAMATGWLQNNGSWYYLNSNGAMATGWLQYNGSWYYLNANGDMATGWLQYNGSWYYLNANGDMATGWLQYNGSWYYLNANGDMATGWVKDGDTWYYLEASGAMKARWFKVSDKWYYVNGSGALAVNTTVDSYRVNANGEWVN

SEQ ID NO: 250 - protein, 340 aa, Streptococcus pneumoniae
  MISC_FEATURE: AnrP181233
MKLLKKMMQIALATFFFGLLATNTVFADDSEGWQFVQENGRTYYKKGDLKETYWRVIDGKYYYFDPLSGEMVVGWQYIPAPHKGVTIGPSPRIEIALRPDWFYFGQDGVLQEFVGKQVLEAKTATNTNKHHGEEYDSQAEKRVYYFEDQRSYHTLKTGWIYEEGHWYYLQKDGGFDSRINRLTVGELARGWVKDYPLTYDEEKLKAAPWYYLNPATGIMQTGWQYLGNRWYYLHSSGAMATGWYKEGSTWYYLDAENGDMRTGWQNLGNKWYYLRSSGAMATGWYQESSTWYYLNASNGDMKTGWFQVNGNWYYAYDSGALAVNTTVGGYYLNYNGEWVK

SEQ ID NO: 251 - protein, 693 aa, Streptococcus pneumoniae
  MISC_FEATURE: AnrP894040
MAREFSLEKTRNIGIMAHVDAGKTTTTERILYYTGKIHKIGETHEGASQMDWMEQEQERGITITSAATTAQWNNHRVNIIDTPGHVDFTIEVQRSLRVLDGAVTVLDSQSGVEPQTETVWRQATEYGVPRIVFANKMDKIGADFLYSVSTLHDRLQANAHPIQLPIGSEDDFRGIIDLIKMKAEIYTNDLGTDILEEDIPAEYLDQAQEYREKLIEAVAETDEELMMKYLEGEEITNEELKAGIRKATINVEFFPVLCGSAFKNKGVQLMLDAVIDYLPSPLDIPAIKGINPDTDAEEIRPASDEEPFAALAFKIMTDPFVGRLTFFRVYSGVLQSGSYVLNTSKGKRERIGRILQMHANSRQEIDTVYSGDIAAAVGLKDTTTGDSLTDEKAKIILESINVPEPVIQLMVEPKSKADQDKMGIALQKLAEEDPTFRVETNVETGETVISGMGELHLDVLVDRMRREFKVEANVGAPQVSYRETFRASTQARGFFKRQSGGKGQFGDVWIEFTPNEEGKGFEFENAIVGGVVPREFIPAVEKGLVESMANGVLAGYPMVDVKAKLYDGSYHDVDSSETAFKIAASLSLKEAAKSAQPAILEPMMLVTITVPEENLGDVMGHVTARRGRVDGMEAHGNSQIVRAYVPLAEMFGYATVLRSASQGRGTFMMVFDHYEDVPKSVQEEIIKKNKGED

SEQ ID NO: 252 - protein, 186 aa, Streptococcus pneumoniae
  MISC_FEATURE: AnrP297298
MIEASKLKAGMTFETADGKLIRVLEASHHKPGKGNTIMRMKLRDVRTGSTFDTSYRPEEKFEQAIIETVPAQYLYKMDDTAYFMNTETYDQYEIPVVNVENELLYILENSDVKIQFYGTEVIGVTVPTTVELTVAETQPSIKGATVTGSGKPATMETGLVVNVPDFIEAGQKLVINTAEGTYVSRA

SEQ ID NO: 253 - protein, 480 aa, Streptococcus pneumoniae
  MISC_FEATURE: AnrP217378
MNFETVIGLEVHVELNTNSKIFSPTSAHFGNDQNANTNVIDWSFPGVLPVLNKGVVDAGIKAALALNMDIHKKMHFDRKNYFYPDNPKAYQISQFDEPIGYNGWIEVKLEDGTTKKIGIERAHLEEDAGKNTHGTDGYSYVDLNRQGVPLIEIVSEADMRSPEEAYAYLTALKEVIQYAGISDVKMEEGSMRVDANISLRPYGQEKFGTKTELKNLNSFSNVRKGLEYEVQRQAEILRSGGQIRQETRRYDEANKATILMRVKEGAADYRYFPEPDLPLFEISDEWIEEMRTELPEFPKERRARYVSDLGLSDYDASQLTANKVTSDFFEKAVALGGDAKQVSNWLQGEVAQFLNAEGKTLEQIELTPENLVEMIAIIEDGTISSKIAKKVFVHLAKNGGGAREYVEKAGMVQISDPAILIPIIHQVFADNEAAVADFKSGKRNADKAFTGFLMKATKGQANPQVALKLLAQELAKLKEN

SEQ ID NO: 254 - protein, 100 aa, Streptococcus pneumoniae
  MISC_FEATURE: AnrP898188
MKITQEEVTHVANLSKLRFSEEETAAFATTLSKIVDMVELLGEVDTTGVAPTTTMADRKTVLRPDVAEEGTDRDRLFKNVPEQDNYYIKVPAILDDGGDA

SEQ ID NO: 255 - protein, 174 aa, Streptococcus pneumoniae
  MISC_FEATURE: AnrP114671
MAQDIKNEEVEEVQEEEVVKTAEETTPEKSELDLANERADEFENKYLRAHAEMQNIQRRANEERQNLQRYRSQDLAKAILPSLDNLERALAVEGLTDDVKKGLGMVQESLIHALKEEGIEEIAADGEFDHNYHMAIQTLPADDEHPVDTIAQVFQKGYKLHDRILRPAMVVVYN

SEQ ID NO: 256 - protein, 607 aa, Streptococcus pneumoniae
  MISC_FEATURE: AnrP17097
MSKIIGIDLGTTNSAVAVLEGTESKIIANPEGNRTTPSVVSFKNGEIIVGDAAKRQAVTNPDTVISIKSKMGTSEKVSANGKEYTPQEISAMILQYLKGYAEDYLGEKVTKAVITVPAYFNDAQRQATKDAGKIAGLEVERIVNEPTAAALAYGLDKTDKEEKILVFDLGGGTFDVSILELGDGVFDVLSTAGDNKLGGDDFDQKIIDHLVAEFKKENGIDLSTDKMAMQRLKDAAEKAKKDLSGVTSTQISLPFITAGEAGPLHLEMTLTRAKFDDLTRDLVERTKVPVRQALSDAGLSLSEIDEVILVGGSTRIPAVVEAVKAETGKEPNKSVNPDEVVAMGAAIQGGVITGDVKDVVLLDVTPLSLGIETMGGVFTKLIDRNTTIPTSKSQVFSTAADNQPAVDIHVLQGERPMAADNKTLGRFQLTDIPAAPRGIPQIEVTFDIDKNGIVSVKAKDLGTQKEQTIVIQSNSGLTDEEIDRMMKDAEANAEADKKRKEEVDLRNEVDQAIFATEKTIKETEGKGFDAERDAAQAALDDLKKAQEDNNLDDMKTKLEALNEKAQGLAVKLYEQAAAAQQAQEGAEGAQATGNAGDDVVDGEFTEK

SEQ ID NO: 257 - protein, 116 aa, Streptococcus pneumoniae
  MISC_FEATURE: AnrP765513
MANHFRTDRVGMEIKREVNEILQKKVRDPRVQGVTIIDVQMLGDLSVAKVYYTILSNLASDNQKAQIGLEKATGTIKRELGRNLKLYKIPDLTFVKDESIEYGNKIDEMLRNLDKN

SEQ ID NO: 258 - protein, 883 aa, Streptococcus pneumoniae
  MISC_FEATURE: AnrP879988
MSKELSPKYNPAEVEAGRYQKWLDADVFKPSGDQKAKPYSIVIPPPNVTGKLHLGHAWDTTLQDIIIRQKRMQGFDTLWLPGMDHAGIATQAKVEERLRGEGITRYDLGRESFLTKVWEWKDEYATTIKEQWGKMGLSVDYSRERFTLDEGLSKAVRKVFVNLYKKGWIYRGEFIINWDPAARTALSDIEVIHKDVEGAFYHMNYMLEDGSRALEVATTRPETMFGDVAVAVNPEDPRYKDLIGKNVILPIANKLIPIVGDEHADPELGTGVVKITPAHDPNDFLVGQRHNLPQVNVMNDDGTMNELAFEFSGMDRFEARKAVVAKLEEIGALVKIEKRVHSVGHSERTGVVVEPRLSTQWFVKMDQLAKNAIANQDTEDKVEFYPPRFNDTFLQWMENVHDWVISRQLWWGHQIPAWYNADGEMYVGEEAPEGDGWTQDEDVLDTWFSSALWPFSTMGWPEVDSEDFKRYFPTSTLVTGYDIIFFWVSRMIFQSLEFTGRQPFQNVLIHGLIRDEQGRKMSKSLGNGIDPMDVIEKYGADALRWFLSNGSAPGQDVRFSYEKMDASWNFINKIWNISRYILMNNEGLTLDVAHDNVTKVATGEAGNVTDRWILHNLNETIAKVTENFDKFEFGVAGHILYNFIWEEFANWYVELTKEVLYSDNEDDKVITRSVLLYTLDKILRLLHPIMPFVTEEIFGQISEGSIVTAAYPTVNLAFEDLAAHTGVESLKDLIRAVRNARAEVNVAPSKPITILVKTSDSDLEAFFNSNVNYIKRFTNPEHLEIASTIPAPELAMSSVITGAEIYLPLADLLNVEEELARLDKELAKWQKELDMVGKKLSNERFVANAKPEVVQKECDKQADYQAKYDATVARIDEMKKLVK

SEQ ID NO: 259 - protein, 141 aa, Streptococcus pneumoniae
  MISC_FEATURE: AnrP59901
MAKKVEKLVKLQIPAGKATPAPPVGPALGQAGINIMGFTKEFNARTADQAGMIIPVVISVYEDKSFTFVTKTPPAAVLLKKAAGVEKGSGTPNKTKVATVTRAQVQEIAETKMPDLNAANVESAMRMIEGTARSMGFTVVD

SEQ ID NO: 260 - protein, 229 aa, Streptococcus pneumoniae
  MISC_FEATURE: AnrP800948
MAKKSKQLRAALEKIDSTKAYSVEEAVALAKETNFAKFDATVEVAYNLNIDVKKADQQIRGAMVLPNGTGKTSRVLVFARGAKAEEAKAAGADFVGEDDLVAKINDGWLDFDVVIATPDMMALVGRLGRVLGPRNLMPNPKTGTVTMDVAKAVEESKGGKITYRADRAGNVQAIIGKVSFEAEKLVENFKAFNETIQKAKPATAKGTYVTNLTITTTQGVGIKVDVNSL

SEQ ID NO: 261 - protein, 78 aa, Streptococcus pneumoniae
  MISC_FEATURE: AnrP119923
MANIKSAIKRAELNVKQNEKNSAQKSAMRTAIKAFEANPSEELFRAASSAIDKAETKGLIHKNKASRDKARLSAKLVK

SEQ ID NO: 262 - protein, 400 aa, Streptococcus pneumoniae
  MISC_FEATURE: AnrP373768
MNEFEDLLNSVSQVETGDVVSAEVLTVDATQANVAISGTGVEGVLTLRELTNDRDADINDFVKVGEVLDVLVLRQVVGKDTDTVTYLVSKKRLEARKAWDKLVGREEEVVTVKGTRAVKGGLSVEFEGVRGFIPASMLDTRFVRNAERFVGQEFDTKIKEVNAKENRFILSRREVVEAATAAARAEVFGKLAVGDVVTGKVARITSFGAFVDLGGVDGLVHLTELSHERNVSPKSVVTVGEEIEVKILDLNEEEGRVSLSLKATVPGPWDGVEQKLAKGDVVEGTVKRLTDFGAFVEVLPGIDGLVHVSQISHKRIENPKEALKVGQEVQVKVLEVNADAERVSLSIKALEERPAQEEGQKEEKRAARPRRPRRQEKRDFELPETQTGFSMADLFGDIEL

SEQ ID NO: 263 - protein, 306 aa, Streptococcus pneumoniae
  MISC_FEATURE: AnrP956241
MLYLLFNHKHKKGTEMQDNYTTKAKHLTIDSRRLIERWKKEGKSNREIASLLGKAPQTIHTEIKRRTVRKCLGKGRFKEVYSADYAQQSYENNRKHSVKKSSLTKELKEKILHYHNQKFSPDKKQASTNFKPAGQSIEQRSEAINLRLENGYYEIDTVLLTRAKNYCLLVLTDRKSRHQIIRLIPNKSAEVVNQALKLILKQHKILSITADNGTEFNRLFDVFSEEHIYYAHPYASWERGTNENHNRLIRRWLPKGTKKMTPKEVAFIEKWINNYPKKCLDYKSPREDFWMANLNLKFSVRNKSRN

SEQ ID NO: 264 - protein, 185 aa, Streptococcus pneumoniae
  MISC_FEATURE: AnrP6905
MANVIIEKAKERMTQSHQSLAREFGGIRAGRANASLLDRVHVEYYGVETPLNQIASITIPEARVLLVTPFDKSSLKDIDRALNASDLGITPANDGSVIRLVIPALTEETRRDLAKEVKKVGENAKVAVRNIRRDAMDEAKKQEKAKEITEDELKTLEKDIQKVTDDAVKHIDDMTANKEKELLEV

SEQ ID NO: 265 - protein, 94 aa, Streptococcus pneumoniae
  MISC_FEATURE: AnrP486464
MTLNNLQLFAHKKGGGSTSNGRDSQAKRLGAKAADGQTVTGGSILYRQRGTHIYPGVNVGRGGDDTLFAKVEGVVRFERKGRDKKQVSVYPIAK

SEQ ID NO: 266 - protein, 80 aa, Streptococcus pneumoniae
  MISC_FEATURE: AnrP255906
MKKDIHPEYRPVVFMDTTTGYQFLSGSTKRSNETVEFEGETYPLIRVEISSDSHPFYTGRQKFTQADGRVDRFNKKYGLK

SEQ ID NO: 267 - protein, 122 aa, Streptococcus pneumoniae
  MISC_FEATURE: AnrP897829
MALNIENIIAEIKEASILELNDLVKAIEEEFGVTAAAPVAVAAADAADAGAAKDSFDVELTSAGDKKVGVIKVVREITGLGLKEAKELVDGAPALVKEGVATAEAEEIKAKLEEAGASVTLK

SEQ ID NO: 268 - protein, 166 aa, Streptococcus pneumoniae
  MISC_FEATURE: AnrP798599
MSEAIIAKKAELVDVVAEKMKAAASIVVVDARGLTVEQDTVLRRELRGSEVEYKVIKNSILRRAAEKAGLEDLASVFVGPSAVAFSNEDVIAPAKILNDFSKNAEALEIKGGAIEGAVASKEEILALATLPNREGLLSMLLSVLQAPVRNVALAVKAVAESKEDAA

SEQ ID NO: 269 - protein, 872 aa, Streptococcus pneumoniae
  MISC_FEATURE: AnrP356001
MKQLSSAQVRQMWLDFWATKGHSVEPSVSLVPVNDPTLLWINSGVATLKKYFDGTIIPENPRITNAQKAIRTNDIENVGKTARHHTMFEMLGNFSIGDYFRDEAITWAYELLTSPEWFDFPAEKLYMTYYPDDKDSYNRWIEVGVDPSHLIPIEDNFWEIGAGPSGPDTEIFFDRGEAFDPENIGLRLLAEDIENDRYIEIWNIVLSQFNADPAVPRSEYKELPHKNIDTGAGLERLVAVIQGAKTNFETDLFMPIIREVEKLSGKVYDQDGDNMSFKVIADHIRSLSFAIGDGALPGNEGRGYVLRRLLRRASMHGQKLGINEPFLYKLVPTVGKIMESYYPEVLEKRDFIEKIVKSEEESFARTLHSGQHFAQGIVADLKEKGQSVIAGSDVFKLYDTYGFPVELTEEIAEEAGMTVDREGFEAAMKEQQERARASAVKGGSMGMQNETLQNITVESVFNYNASQLSSKLVAIVADNAEVGAVSEGTASLIFAETSFYAEMGGQVADYGQILDESGKVVATVTNVQKAPNGQALHTVEVLAPLALNQEYTLAIDSNRRHRVMKNHTATHLLHAALHNILGNHATQAGSLNEVEFLRFDFTHFQAVTAEELRAIEQQVNEKIWEALEVKTVETDIDTAKEMGAMALFGEKYGKEVRVVTIGDYSIELCGGTHVDNTSEIGLFKIVKEEGIGSGTRRILAVTGKEAFEAYREQEDALKAIAATLKAPQVKEVPHKVEGLQEQLRQLQKENAELKEKAAAAAAGDIFKDVKEVNGHRYIASQVSVSDAGALRTFADNWKQKDYSDLLVLVAAIGDKVNVLVASKTKDLHAGNLVKELAPIIDGRGGGKPDMAMAGGSNQPKIQELLDAVAGKL

SEQ ID NO: 270 - protein, 160 aa, Streptococcus pneumoniae
  MISC_FEATURE: AnrP309378
MAEKTYPMTLEEKEKLEKELEELKLVRRPEVVERIKIARSYGDLSENSEYEAAKDEQAFVEGQISSLETKIRYAEIVNSDAVAQDEVAIGKTVTIQEIGEDEEEVYIIVGSAGADAFVGKVSNESPIGQALIGKKTGDTATIETPVGSYDVKILKVEKTA

SEQ ID NO: 271 - protein, 96 aa, Streptococcus pneumoniae
  MISC_FEATURE: AnrP294367
MAKYEILYIIRPNIEEEAKNALVARFDSILTDNGATVVESKTWEKRRLAYEIQDFREGLYHIVNVEANDDAALKEFDRLSKINADILRHMIVKIDA

SEQ ID NO: 272 - protein, 447 aa, Streptococcus pneumoniae
  MISC_FEATURE: AnrP260460
MTKRVTIIDVKDYVGQEVTIGAWVANKSGKGKIAFLQLRDGTAFFQGVAFKPNFVEKFGEEVGLEKFDVIKRLSQETSVYVTGIVKEDERSKFGYELDITDIEVIGESQDYPITPKEHGTDFLMDNRHLWLRSRKQVAVLQIRNAIIYATYEFFDKNGFMKFDSPILSGNAAEDSTELFETDYFGTPAYLSQSGQLYLEAGAMALGRVFDFGPVFRAEKSKTRRHLTEFWMMDAEYSYLTHDESLDLQEAYVKALLQGVLDRAPQALETLERDTELLKRYIAEPFKRITYDQAIDLLQEHENDEDADYEHLEHGDDFGSPHETWISNHFGVPTFVMNYPAAIKAFYMKPVPGNPERVLCADLLAPEGYGEIIGGSMREEDYDALVAKMDELGMDRTEYEFYLDLRKYGTVPHGGFGIGIERMVTFAAGTKHIREAIPFPRMLHRIKP

SEQ ID NO: 273 - protein, 89 aa, Streptococcus pneumoniae
  MISC_FEATURE: AnrP300542
MAISKEKKNEIIAQYARHEGDTGSVEVQVAVLTWEINHLNEHIKQHKKDHATYRGLMKKIGRRRNLLAYLRKNDVNRYRELINSLGLRR

SEQ ID NO: 274 - protein, 930 aa, Streptococcus pneumoniae
  MISC_FEATURE: AnrP433335
MKLKDTLNLGKTEFPMRAGLPTKEPVWQKEWEYAKLYQRRQELNQGKPHFTLHDGPPYANGNIHVGHAMNKISKDIIVRSKSMSGFYAPFIPGWDTHGLPIEQVLSKQGVKRKEMDLVEYLKLCREYALSQVDKQREDFKRLGVSGDWENPYVTLTPDYEAAQIRVFGEMANKGYIYRGAKPVYWSWSSESALAEAEIEYHDLVSTSLYYANKVKDGKGVLDTDTYIVVWTTTPFTITASRGLTVGADIDYVLVQPAGEARKFVVAAELLTSLSEKFGWADVQVLETYRGQELNHIVTEHPWDTAVEELVILGDHVTTDSGTGIVHTAPGFGEDDYNVGIANNLEVAVTVDERGIMMKNAGPEFEGQFYEKVVPTVIEKLGNLLLAQEEISHSYPFDWRTKKPIIWRAVPQWFASVSKFRQEILDEIEKVKFHSEWGKVRLYNMIRDRGDWVISRQRAWGVPLPIFYAEDGTAIMVAETIEHVAQLFEEHGSSIWWERDAKDLLPEGFTHPGSPNGEFKKETDIMDVWFDSGSSWNGVVVNRPELTYPADLYLEGSDQYRGWFNSSLITSVANHGVAPYKQILSQGFALDGKGEKMSKSLGNTIAPSDVEKQFGAEILRLWVTSVDSSNDVRISMDILSQVSETYRKIRNTLRFLIANTSDFNPAQDTVAYDELRSVDKYMTIRFNQLVKTIRDAYADFEFLTIYKALVNFINVDLSAFYLDFAKDVVYIEGAKSLERRQMQTVFYDILVKITKLLTPILPHTAEEIWSYLEFETEDFVQLSELPEVQTFANQEEILDTWAAFMDFRGQAQKALEEARNAKVIGKSLEAHLTVYPNEVVKTLLEAVNSNVAQLLIVSELTIAEGPAPEAALSFEDVAFTVERATGEVCDRCRRIDPTTAERSYQAVICDHCASIVEENFAEAVAEGFEEK

SEQ ID NO: 275 - protein, 540 aa, Streptococcus pneumoniae
  MISC_FEATURE: AnrP164745
MSKEIKFSSDARSAMVRGVDILADTVKVTLGPKGRNVVLEKSFGSPLITNDGVTIAKEIELEDHFENMGAKLVSEVASKTNDIAGDGTTTATVLTQAIVREGIKNVTAGANPIGIRRGIETAVAAAVEALKNNAIPVANKEAIAQVAAVSSRSEKVGEYISEAMEKVGKDGVITIEESRGMETELEVVEGMQFDRGYLSQYMVTDSEKMVADLENPYILITDKKISNIQEILPLLESILQSNRPLLIIADDVDGEALPTLVLNKIRGTFNVVAVKAPGFGDRRKAMLEDIAILTGGTVITEDLGLELKDATIEALGQAARVTVDKDSTVIVEGAGNPEAISHRVAVIKSQIETTTSEFDREKLQERLAKLSGGVAVIKVGAATETELKEMKLRIEDALNATRAAVEEGIVAGGGTALANVIPAVATLELTGDEATGRNIVLRALEEPVRQIAHNAGFEGSIVIDRLKNAELGIGFNAATGEWVNMIDQGIIDPVKVSRSALQNAASVASLILTTEAVVANKPEPVAPAPAMDPSMMGGMM

SEQ ID NO: 276 - protein, 94 aa, Streptococcus pneumoniae
  MISC_FEATURE: AnrP792414
MLKPLGDRLVLKVEEKEQTVGGFVLAGSAQEKTKTAQVVATGQGVRTLNGDLVAPSVKTGDRVLVEAHAGLDVKDGDEKYIIVGEANILAIIEE

SEQ ID NO: 277 - protein, 471 aa, Streptococcus pneumoniae
  MISC_FEATURE: AnrP257166
MANKAVNDFILAMNYDKKKLLTHQGESIENRFIKEGNQLPDEFVVIERKKRSLSTNTSDISVTATNDSRLYPGALLVVDETLLENNPTLLAVDRAPMTYSIDLPGLASSDSFLQVEDPSNSSVRGAVNDLLAKWHQDYGQVNNVPARMQYEKITAHSMEQLKVKFGSDFEKTGNSLDIDFNSVHSGEKQIQIVNFKQIYYTVSVDAVKNPGDVFQDTVTVEDLKQRGISAERPLVYISSVAYGRQVYLKLETTSKSDEVEAAFEALIKGVKVAPQTEWKQILDNTEVKAVILGGDPSSGARVVTGKVDMVEDLIQEGSRFTADHPGLPISYTTSFLRDNVVATFQNSTDYVETKVTAYRNGDLLLDHSGAYVAQYYITWNELSYDHQGKEVLTPKAWDRNGQDLTAHFTTSIPLKGNVRNLSVKIRECTGLAWEWWRTVYEKTDLPLVRKRTISIWGTTLYPQVEDKVEND

SEQ ID NO: 278 - protein, 563 aa, Streptococcus pneumoniae
  MISC_FEATURE: AnrP972554
MNTKELIASELSSIIDSLDQEAILKLLETPKNSEMGDIAFPAFSLAKVERKAPQMIAAELAEKMNSQAFEKVVATGPYVNFFLDKSAISAQVLQAVTTEKEHYADQNIGKQENVVIDMSSPNIAKPFSIGHLRSTVIGDSLSHIFQKIGYQTVKVNHLGDWGKQFGMLIVAYKKWGDEEAVKAHPIDELLKLYVRINAEAENDPSLDEEAREWFRKLENGDEEALALWQWFRDESLVEFNRLYNELKVEFDSYNGEAFYNDKMDAVVDILSEKGLLLESEGAQVVNLEKYGIEHPALIKKSDGATLYITRDLAAALYRKNEYQFAKSIYVVGQEQSAHFKQLKAVLQEMGYDWSDDITHVPFGLVTKEGKKLSTRKGNVILLEPTVAEAVSRAKVQIEAKNPELENKDQVAHAVGIGAIKFYDLKTDRTNGYDFDLEAMVSFEGETGPYVQYAYARIQSILRKADFKPETAGNYSLNDTESWEIIKLIQDFPRIINRAADNFEPSIIAKFAISLAQSFNKYYAHTRILDESPERDSRLALSYATAVVLKEALRLLGVEAPEKM

SEQ ID NO: 279 - protein, 418 aa, Streptococcus pneumoniae
  MISC_FEATURE: AnrP659187
MHIFDELKERGLIFQTTDEEALRKALEEGQVSYYTGYDPTADSLHLGHLVAILTSRRLQLAGHKPYALVGGATGLIGDPSFKDAERSLQTKDTVDGWVKSIQGQLSRFLDFENGENKAVMVNNYDWFGSISFIDFLRDIGKYFTVNYMMSKESVKKRIETGISYTEFAYQIMQGYDFFVLNQDHNVTLQIGGSDQWGNMTAGTELLRRKADKTGHVITVPLITDATGKKFGKSEGNAVWLNPEKTSPYEMYQFWMNVMDADAVRFLKIFTFLSLDEIEDIRKQFEAAPHERLAQKVLAREVVTLVHGEEAYKEALNITEQLFAGNIKNLSVKELKQGLRGVPNYQVQADENNNIVELLVSSGIVNSKRQAREDVQNGAIYVNGDRIQELDYVLSDADKLENELTVIRRGKKKYFVLTY

SEQ ID NO: 280 - protein, 182 aa, Streptococcus pneumoniae
  MISC_FEATURE: AnrP957869
MIKYSIRGENLEVTEAIRDYVVSKLEKIEKYFQPEQELDARINLKVYREKTAKVEVTIPLGSITLRAEDVSQDMYGSIDLVTDKIERQIRKNKTKIERKNKNKVATGQLFTDALVEDSNIVQSKVVRSKQIDLKPMDLEEAILQMDLLGHDFFIYVDVEDQTTNVIYRREDGEIGLLEVKES

SEQ ID NO: 281 - protein, 346 aa, Streptococcus pneumoniae
  MISC_FEATURE: AnrP904896
MAEITAKLVKELREKSGAGVMDAKKALVETDGDIEKAIELLREKGMAKAAKKADRVAAEGLTGVYVNGNVAAVIEVNAETDFVAKNAQFVELVNTTAKVIAEGKPANNEEALALIMPSGETLEAAYVSATATIGEKISFRRFALIEKTDAQHFGAYQHNGGRIGVISVVEGGDEALAKQLSMHIAAMKPTVLSYKELDEQFVKDELAQLNHVIDQDNESRAMVNKPALPHLKYGSKAQLTDDVIAQAEADIKAELAAEGKPEKIWDKIIPGKMDRFMLDNTKVDQAYTLLAQVYIMDDSKTVEAYLESVNASVVEFARFEVGEGIEKAANDFEAEVAATMAAALNN

SEQ ID NO: 282 - protein, 378 aa, Streptococcus pneumoniae
  MISC_FEATURE: AnrP966090
MIHFSINKNLFLQALNTTKRAISSKNAIPILSTVKIDVTNEGITLIGSNGQISIENFISQKNEDAGLLITSLGSILLEASFFINVVSSLPDVTLDFKEIEQNQIVLTSGKSEITLKGKDSEQYPRIQEISASTPLILETKLLKKIINETAFAASTQESRPILTGVHFVLSQHKELKTVATDSHRLSQKKLTLEKNSDDFDVVIPSRSLREFSAVFTDDIETVEIFFANNQILFRSENISFYTRLLEGNYPDTDRLIPTDFNTTITFNVVNLRQSMERARLLSSATQNGTVKLEIKDGVVSAHVHSPEVGKVNEEIDTDQVTGEDLTISFNPTYLIDSLKALNSEKVTISFISAVRPFTLVPADTDEDFMQLITPVRTN

SEQ ID NO: 283 - protein, 329 aa, Streptococcus pneumoniae
  MISC_FEATURE: Lipoate-protein ligase A [Streptococcus pyogenes MGAS6180]
MKYIVNKSHNPAFNIALEAYAFRELVEEDELFILWINEPAIIIGKHQNTIQEINKEYIDEHGIHVVRRLSGGGAVYHDLNNLNYTIISNKTAEGAFDFKTFSQPVIATLADLGVTANFTGRNDIEIDGKKICGNAQAYYKGRMMHHGCLLFDVDMTVLGDALKVSKDKIESKGVKSVRARVTNILNELPEKITVEEFSDKILTKMKETYPDMTEYVLSEDELAKIEQSAKEQFGSWDWTYGKAPEYTIERNVRYPAGKISTFANVENSIIKNLKIYGDFFGIKDVQDIENLLIGCKYEYRDVFECLKTIDTTQYFSRMTVEEVAKAIVS

SEQ ID NO: 284 - protein, 329 aa, Streptococcus pneumoniae
  MISC_FEATURE: Hypothetical protein gbs0899 [Streptococcus agalactiae NEM316]
MKYIVNTSNDPAYNVALEAYAFQKLTDIDEIFILWINEPAIIIGRHQNTIQEINKEFIDKNGIHVVRRLSGGGAVYHDLNNLNYTIISNNTQEGAFDFQTFSKPVIDTLAKLGVKAEFTGRNDLEINGQKFAGNAQAYYKGRMMHHGCLLFDVDMSVLGQALKVSKDKIESKGIKSVRARVTNIVDHLSDKITVQEFSDAILAQMKEEYPEMDEYVLSDAELSEIQAMRDNQFATWDWTYGKAPEYTIERGVRYPAGKITTYANVENSTIKSVKIFGDFFGVKPVDDIEKMLEGVRYDYKDVLAALKTVDTSQYFSRMTPEEITKAIVD

SEQ ID NO: 285 - protein, 331 aa, Streptococcus pneumoniae
  MISC_FEATURE: Hypothetical protein lmo0931 [Listeria monocytogenes EGD-e]
MYFIDNNNEKDPRINLAVEEFILTELNLDEPVLLFYINKPSIIIGRNQNTVEEIDTEYVEKNDVIVVRRLSGGGAVYHDEGNLNFSFITEDDGESFHNFAKFTQPIVEALKRLGVNAELKGRNDLLIDGFKVSGNAQFATKGKMFSHGTLMYDLNLDNVAASLKPRKDKIESKGIKSVRSRVANISDFMDQEMTTEEFRDLLLLYIFGVEKVEDVKEYKLTAADWEKIHEISAKRYGNWDWNYGKSPKFDLTRTKRFPVGAVDVRLNVQKGVITDIKIFGDFFGVKNVADIEEKLVNTTYKREVLAEALVDIDVKEYFGNITKDEFLDLLY

SEQ ID NO: 286 - protein, 196 aa, Streptococcus pneumoniae
  MISC_FEATURE: ATP-dependent Clp protease proteolytic subunit [Streptococcus pyogenes MGAS6180]
MIPVVIEQTSRGERSYDIYSRLLKDRIIMLTGPVEDNMANSVIAQLLFLDAQDNTKDIYLYVNTPGGSVSAGLAIVDTMNFIKADVQTIVMGMAASMGTVIASSGTKGKRFMLPNAEYMIHQPMGGTGGGTQQTDMAIAAEHLLKTRHRLEKILAQNAGKTIKQIHKDAERDYWMSAEETLTYGFIDEIMENNELK

SEQ ID NO: 287 - protein, 196 aa, Streptococcus pneumoniae
  MISC_FEATURE: Streptococcus agalactiae clpP gene for ClpP serine protease
MIPVVIEQTSRGERSYDIYSRLLKDRIIMLTGQVEDNMANSIIAQLLFLDAQDNTKDIYLYVNTPGGSVSAGLAIVDTMNFIKSDVQTIVMGMAASMGTIIASSGAKGKRFMLPNAEYMIHQPMGGTGGGTQQSDMAIAAEHLLKTRHTLEKILADNSGQSIEKVHDDAERDRWMSAQETLDYGFIDAIMENNNLQ

SEQ ID NO: 288 - protein, 198 aa, Streptococcus pneumoniae
  MISC_FEATURE: ATP-dependent Clp protease proteolytic subunit [Listeria monocytogenes]
MNLIPTVIEQTSRGERAYDIYSRLLKDRIIMLGSAIDDNVANSIVSQLLFLDAQDPEKDIFLYINSPGGSISAGMAIYDTMNFVKADVQTIGMGMAASMGSFLLTAGANGKRFALPNAEIMIHQPLGGAQGQATEIEIAARHILKIKERMNTIMAEKTGQPYEVIARDTDRDNFMTAQEAKDYGLIDDIIINKSGLKG

SEQ ID NO: 289 - protein, 6 aa, Streptococcus pneumoniae
DLSVLA

SEQ ID NO: 290 - protein, 7 aa, Streptococcus pneumoniae
IINELPK

SEQ ID NO: 291 - protein, 3 aa, Streptococcus pneumoniae
IDG

SEQ ID NO: 292 - protein, 15 aa, Streptococcus pneumoniae
SKDKFESKGVKSVRA

SEQ ID NO: 293 - protein, 10 aa, Streptococcus pneumoniae
VEKFRDLLLE

SEQ ID NO: 294 - protein, 5 aa, Streptococcus pneumoniae
KKEYP

SEQ ID NO: 295 - protein, 368 aa, Streptococcus pneumoniae
  MISC_FEATURE: AnrP516029 fused to E. coli heat-stable enterotoxin ST-Ia
MYYLPSFSQKAESVDSSKEKITLDTKKCNVVKNNSEKKHHKYIINHSNDTAFNIALEEYAFKHLLDEDQIFLLWINKPSIIVGRHQNTIEEINRDYVRENGIEVVRRISGGGAVYHDLNNLNYTIISKEDENKAFDFKSFSTPVINTLAQLGVKAEFTGRNDLEIDGKKFCGNAQAYINGRIMHHGCLLFDVDLSVLANALKVSKDKFESKGVKSVRARVTNIINELPKKITVEKFRDLLLEYMKKEYPEMTEYVFSEEELAEINRIKDTKFGTWDWNYGKSPEFNVRRGIKFTSGKVEVFANVTESKIQDIKIYGDFFGIEDVAAVEDVLRGVKYEREDVLKALKTIDITRYFAGISREEIAEAVVG

SEQ ID NO: 296 - protein, 366 aa, Streptococcus pneumoniae
  MISC_FEATURE: AnrP516029 fused to E.coli heat-stable enterotoxin EAST1
MPSTQYIRRPASSYASCIWCATACASCHGRTTKPSLATKYIINHSNDTAFNIALEEYAFKHLLDEDQIFLLWINKPSIIVGRHQNTIEEINRDYVRENGIEVVRRISGGGAVYHDLNNLNYTIISKEDENKAFDFKSFSTPVINTLAQLGVKAEFTGRNDLEIDGKKFCGNAQAYINGRIMHHGCLLFDVDLSVLANALKVSKDKFESKGVKSVRARVTNIINELPKKITVEKFRDLLLEYMKKEYPEMTEYVFSEEELAEINRIKDTKFGTWDWNYGKSPEFNVRRGIKFTSGKVEVFANVTESKIQDIKIYGDFFGIEDVAAVEDVLRGVKYEREDVLKALKTIDITRYFAGISREEIAEAVVG
